(19) United States
(12) Patent Application Publication
(10) Pub. No.: US 2024/0350607 A1
(43) Pub. Date: Oct. 24, 2024

(54) TUBERCULOSIS VACCINES

(71) Applicant: Vir Biotechnology, Inc., San Francisco, CA (US)

(72) Inventors: Ann M. Arvin, San Francisco, CA (US); Julia Di Iulio, San Francisco, CA (US); Janet L. Douglas, San Francisco, CA (US); Emily Marshall, San Francisco, CA (US); Leah B. Soriaga, San Francisco, CA (US); Herbert W. Virgin, San Francisco, CA (US)

(21) Appl. No.: 18/687,463

(22) PCT Filed: Aug. 30, 2022
(86) PCT No.: PCT/US2022/075645

§ 371 Date: Feb. 28, 2024

Related U.S. Application Data
(60) Provisional application No. 63/392,778, filed on Jul. 27, 2022.
(60) Provisional application No. 63/239,278, filed on Aug. 31, 2021.

(51) Int. Cl. A61K 39/04; A61K 39/00; C07K 14/35; C12N 5/0783; C12N 15/86

(52) U.S. Cl. CPC A61K 39/04; A61K 39/4611; C07K 14/35; C12N 5/0636; C12N 15/86; A61K 2039/5256; C07K 2319/42; C12N 2510/00; C12N 2710/16143

(57) ABSTRACT

The disclosure relates to tuberculosis antigens and vectors for delivering the antigens. The disclosure also relates to immunogenic compositions comprising the same, and their uses.

### STATEMENT REGARDING SEQUENCE LISTING

[0001] The Sequence Listing associated with this application is provided in XML format in lieu of a paper copy, and is hereby incorporated by reference into the specification. The name of the XML file containing the Sequence Listing is 930485_439WO_SequenceListing.xml. The XML file is 558,770 bytes, was created on Aug. 22, 2022, and is being submitted electronically via EFS-Web.

### BACKGROUND

[0002] Tuberculosis remains a leading cause of disease and mortality globally (Schito, M et al. Perspectives on Advances in Tuberculosis Diagnostics, Drugs, and Vaccines. Clin Infect Dis. 61 Suppl 3, S102-118 (2015)). Accordingly, there remains a need for effective preventative or therapeutic vaccines for Mycobacterium tuberculosis infections.

[0003] Cytomegalovirus (CMV)-based vaccine vectors have been found to result in strong immune responses to delivered antigens, even for pathogens that have traditionally been able to evade natural immunity and cause repeated or chronic infection. For example, the 68-1 strain of rhesus cytomegalovirus (RhCMV) modified to encode simian immunodeficiency virus (SIV) antigens has been associated with long-lasting protection against SIV challenge (Hansen, S G et al., Immune clearance of highly pathogenic SIV infection. Nature 502, 100-104 (2013); Hansen, S G et al., Profound early control of highly pathogenic SIV by an effector memory T-cell vaccine. Nature 473, 523-527 (2011); Hansen, S G et al., Effector memory T cell responses are associated with protection of rhesus monkeys from mucosal simian immunodeficiency virus challenge. Nat Med. 15, 293-299 (2009)). Subsequent research with CMV vectors revealed that different immune responses could be elicited depending on the specific genetic components of the CMV backbone (Fruh, K et al., CD8+ T cell programming by cytomegalovirus vectors: applications in prophylactic and therapeutic vaccination. Curr Opin Immunol. 47, 52-56 (2017); Hansen, S G et al. Cytomegalovirus vectors violate CD8+ T cell epitope recognition paradigms. Science 340, 1237874 (2013)). The 68-1 of Rhesus cytomegalovirus (RhCMV) has been shown to elicit CD8+ T cells that recognize peptides presented by MHC-II and MHC-E instead of conventional MIIC-I. This effect has also been observed in cynomolgus monkey CMV (CyCMV), demonstrating that deletion of the RhCMV and CyCMV homologs of HCMV UL128, UL130, UL146, and UL147 enables the induction of MHC-E-restricted CD8+ T cells (International Application Publication Nos. WO2016/130693A1, WO2018/075591A1). In addition, these vectors elicit MHC-II restricted CD8+ T cells. The induction of MHC-II restricted CD8+ T cells can be eliminated by the insertion of a targeting site for the endothelial cell specific micro RNA (miR) 126 into essential viral genes of these vectors, resulting in “MHC-E only” vectors that exclusively elicit MHC-E restricted CD8+ T cells (International Application Publication No. WO2018/075591A1). In contrast, insertion of the myeloid cell specific miR142-3p into 68-1 RhCMV has been shown to prevent the induction of MHC-E restricted CD8+ T cells, resulting in vectors that elicit CD8+ T cells exclusively restricted by MHC-II (International Application Publication No. WO2017/087921A1). Deletion of the UL40 homolog Rh67 has also been shown to prevent the induction of MHC-E restricted CD8+ T cells, resulting in “MHC-II-only vectors” (International Application Publication No. WO2016/130693A1). Accordingly, by designing CMV vectors to have particular gene deletions, CMV can be used to deliver antigens and “program” immune responses to those antigens.

### BRIEF SUMMARY

[0004] Disclosed herein are fusion proteins comprising Mycobacterium tuberculosis (Mtb) antigens and nucleic acids encoding the fusion proteins. In some embodiments, the present disclosure provides a fusion protein comprising one or more of Mtb Ag85A, ESAT-6, Rv3407, Rv2626c, RpfA, RpfD, Ra12, TbH9, and Ra35, or portions or fragments thereof. In some embodiments, the present disclosure provides vectors encoding a fusion protein as described above.

### BRIEF DESCRIPTION OF THE DRAWING

[0005] FIG. 1 shows examples of fusion proteins comprising Mtb antigens.

[0006] FIG. 2 shows fusion proteins Fusion 6, Fusion 7, and Fusion 8 comprising Mtb antigens. “M72” in the figure refers to M72-fusion-2.

[0007] FIG. 3 summarizes protein conservation of Mtb antigens and RpfA variants. A total of 4884 strains/isolates were included in analysis across all Mtb antigens and RpfA variants. The number of aligned isolates per amino acid position is indicated in the figure. Isolates annotated as “Rv0867c” were included in the analysis of RpfA variants.

[0008] FIG. 4 shows variable RpfA protein length distributed across Mtb isolates. Circled areas indicate groups of isolates with different categories of truncations and/or deletions.

[0009] FIG. 5 shows geographical distribution of full-length RpfA variants. The analysis was performed on the group of isolates labeled “Isolates with the full-length protein” from FIG. 4. The top twenty geographical locations with the largest fraction of isolates bearing full-length RpfA genes are shown. Full-length RpfA was defined as longer than 400 amino acids. The y-axis label “missing” refers to isolates with unknown location information.

[0010] FIGS. 6A-6L show frequencies of “responding” (cytokine-expressing) CD4+ or CD8+ T cells (as indicated) in peripheral blood mononuclear cells (PBMCs) isolated from rhesus macaques administered viral vectors expressing Fusion 6 under the control of either a UL78 or UL82 promoter. PBMCs were collected at 0, 2, 4, 6, 8, and 10 weeks post-dosing and stimulated with Mtb peptide pools containing peptides from genes expressed in Fusion 6 (Ag58A (FIGS. 6A-6B), Rv2626 (FIGS. 6C-6D), RpfA (FIGS. 6E-6F), ESAT6 (FIGS. 6G-6H), Rv3407 (FIGS. 6I-6J), or RpfD (FIGS. 6K-6L)) prior to intracellular cytokine staining (ICS). Solid lines indicate a viral vector dose of 10⁶ pfu, dotted lines indicate a viral vector dose of 10⁵ pfu.

[0011] FIGS. 7A-7N show frequencies of “responding” (cytokine-expressing) CD4+ or CD8+ T cells (as indicated) in peripheral blood mononuclear cells (PBMCs) isolated from rhesus macaques administered viral vectors expressing Fusion 7 under the control of either a UL78 or UL82 promoter or Fusion 8 under the control of a UL82 promoter. PBMCs were collected at 0, 2, 4, and 6 weeks post-dosing and stimulated with Mtb peptide pools containing peptides from genes expressed in Fusion 6 (Ag58A (FIGS. 7A-7B), Rv2626 (FIGS. 7C-7D), RpfA (FIGS. 7E-7F), ESAT6 (FIGS. 7G-7H), Rv3407 (FIGS. 7I-7J), or RpfD (FIGS. 7K-7L)) and M72-fusion-2 (labeled “M72” in FIGS. 7M-7N) prior to intracellular cytokine staining (ICS). Solid lines indicate a viral vector dose of 10⁶ pfu, dotted lines indicate a viral vector dose of 10⁵ pfu.

[0012] FIG. 8 summarizes potential indications for Vector 4 (SEQ ID NO:44). “TB” refers to tuberculosis. “NHP” refers to non-human primates.

[0013] FIG. 9 shows a development plan to evaluate Vector 4 (SEQ ID NO:44) for use in prevention of pulmonary tuberculosis in adolescents and adults

[0014] FIG. 10 shows a development plan to evaluate Vector 4 (SEQ ID NO:44) for use in prevention of Mtb infection and prevention of tuberculosis relapse in adolescents and adults.

### DETAILED DESCRIPTION

### I. Glossary

[0015] The following sections provide a detailed description of tuberculosis antigens, and related pharmaceutical compositions and methods of inducing an immune response, such as an anti-Mycobacterium tuberculosis response, and methods of treating or preventing tuberculosis. Prior to setting forth this disclosure in more detail, it may be helpful to an understanding thereof to provide definitions of certain terms to be used herein. Additional definitions are set forth throughout this disclosure.

[0016] Unless the context requires otherwise, throughout the present specification and claims, the word “comprise” and variations thereof, such as “comprises” and “comprising,” are to be construed in an open, inclusive sense, that is, as “including, but not limited to”. “Consisting of” shall mean excluding more than trace elements of other ingredients and substantial method steps disclosed herein, and in the case of an amino acid or nucleic acid sequence, excluding additional amino acids or nucleotides, respectively. The term “consisting essentially of” limits the scope of a claim to the specified materials or steps, or to those that do not materially affect the basic characteristics of a claimed invention. For example, a composition consisting essentially of the elements as defined herein would not exclude trace contaminants from the isolation and purification method and pharmaceutically acceptable carriers, such as phosphate buffered saline, preservatives, and the like. Similarly, a protein consists essentially of a particular amino acid sequence when the protein includes additional amino acids that contribute to at most 20% of the length of the protein and do not substantially affect the activity of the protein (e.g., alters the activity of the protein by no more than 50%). Embodiments defined by each of the transitional terms are within the scope of this invention.

[0017] In the present description, the term “about” means±20% of the indicated range, value, or structure, unless otherwise indicated.

[0018] It should be understood that the terms “a” and “an” as used herein include “one or more” of the enumerated components unless stated otherwise. The use of the alternative (e.g., “or”) should be understood to mean either one, both, or any combination thereof of the alternatives, and may be used synonymously with “and/or”. As used herein, the terms “include” and “have” are used synonymously, which terms and variants thereof are intended to be construed as non-limiting.

[0019] The word “substantially” does not exclude “completely”; e.g., a composition which is “substantially free” from Y may be completely free from Y. Where necessary, the word “substantially” may be omitted from definitions provided herein.

[0020] As used herein, the terms “peptide”, “polypeptide”, and “protein” and variations of these terms refer to a molecule, in particular a peptide, oligopeptide, polypeptide, or protein including fusion protein, respectively, comprising at least two amino acids joined to each other by a normal peptide bond, or by a modified peptide bond, such as for example in the cases of isosteric peptides. For example, a peptide, polypeptide, or protein may be composed of amino acids selected from the 20 amino acids defined by the genetic code, linked to each other by a normal peptide bond (“classical” polypeptide). A peptide, polypeptide, or protein can be composed of L-amino acids and/or D-amino acids. In particular, the terms “peptide”, “polypeptide”, and “protein” also include “peptidomimetics,” which are defined as peptide analogs containing non-peptidic structural elements, which peptides are capable of mimicking or antagonizing the biological action(s) of a natural parent peptide. A peptidomimetic lacks classical peptide characteristics such as enzymatically scissile peptide bonds. In particular, a peptide, polypeptide, or protein may comprise amino acids other than the 20 amino acids defined by the genetic code in addition to these amino acids, or it can be composed of amino acids other than the 20 amino acids defined by the genetic code. In particular, a peptide, polypeptide, or protein in the context of the present disclosure can equally be composed of amino acids modified by natural processes, such as post-translational maturation processes or by chemical processes, which are well known to a person skilled in the art. Such modifications are fully detailed in the literature. These modifications can appear anywhere in the polypeptide: in the peptide skeleton, in the amino acid chain, or even at the carboxy- or amino-terminal ends. In particular, a peptide or polypeptide can be branched following an ubiquitination or be cyclic with or without branching. This type of modification can be the result of natural or synthetic post-translational processes that are well known to a person skilled in the art. The terms “peptide”, “polypeptide”, or “protein” in the context of the present disclosure in particular also include modified peptides, polypeptides, and proteins. For example, peptide, polypeptide, or protein modifications can include acetylation, acylation, ADP-ribosylation, amidation, covalent fixation of a nucleotide or of a nucleotide derivative, covalent fixation of a lipid or of a lipidic derivative, the covalent fixation of a phosphatidylinositol, covalent or non-covalent cross-linking, cyclization, disulfide bond formation, demethylation, glycosylation including pegylation, hydroxylation, iodization, methylation, myristoylation, oxidation, proteolytic processes, phosphorylation, prenylation, racemization, seneloylation, sulfatation, amino acid addition such as arginylation, or ubiquitination. Such modifications are fully detailed in the literature (Proteins Structure and Molecular Properties, 2nd Ed., T. E. Creighton, New York (1993); Post-translational Covalent Modifications of Proteins, B. C. Johnson, Ed., Academic Press, New York (1983); Seifter, et al., Analysis for protein modifications and nonprotein cofactors, Meth. Enzymol. 182:626-46 (1990); and Rattan, et al., Protein Synthesis: Post-translational Modifications and Aging, Ann NY Acad Sci 663:48-62(1992)). Accordingly, the terms “peptide”, “polypeptide”, and “protein” include for example lipopeptides, lipoproteins, glycopeptides, glycoproteins, and the like. “Orthologs” of proteins are typically characterized by possession of greater than 75% sequence identity counted over the full-length alignment with the amino acid sequence of specific protein using an alignment algorithm, for example, the ALIGN program (version 2.0) set to default parameters. Proteins with even greater similarity to a reference sequence will show increasing percentage identities when assessed by this method, such as at least 80%, at least 85%, at least 90%, at least 92%, at least 95%, or at least 98% sequence identity. In addition, sequence identity can be compared over the full length of particular domains of the disclosed peptides.

[0021] As used herein a “(poly)peptide” comprises a single chain of amino acid monomers linked by peptide bonds as explained above. A “protein”, as used herein, comprises one or more, e.g., 1, 2, 3, 4, 5, 6, 7, 8, 9 or 10 (poly)peptides, i.e., one or more chains of amino acid monomers linked by peptide bonds as explained above. In particular embodiments, a protein according to the present disclosure comprises 1, 2, 3, or 4 polypeptides.

[0022] As used herein, the terms “nucleic acid”, “nucleic acid molecule,” “nucleic acid sequence,” and “polynucleotide” are used interchangeably and are intended to include DNA molecules and RNA molecules, including, without limitation, messenger RNA (mRNA), DNA/RNA hybrids, or synthetic nucleic acids. The nucleic acid may be single-stranded, or partially or completely double stranded (duplex). Duplex nucleic acids may be homoduplex or heteroduplex. A nucleic acid molecule may be single-stranded or double-stranded.

[0023] As used herein, the term “coding sequence” is intended to refer to a polynucleotide molecule, which encodes the amino acid sequence of a protein product. The boundaries of the coding sequence are generally determined by an open reading frame, which usually begins with an ATG start codon.

[0024] The term “expression” as used herein refers to any step involved in the production of the polypeptide, including transcription, post-transcriptional modification, translation, post-translational modification, secretion, or the like.

[0025] As used herein, the term “sequence variant” refers to any sequence having one or more alterations in comparison to a reference sequence, whereby a reference sequence is any of the sequences listed in the sequence listing, i.e., SEQ ID NO:1 to SEQ ID NO:40. Thus, the term “sequence variant” includes nucleotide sequence variants and amino acid sequence variants. For a sequence variant in the context of a nucleotide sequence, the reference sequence is also a nucleotide sequence, whereas for a sequence variant in the context of an amino acid sequence, the reference sequence is also an amino acid sequence. A “sequence variant” as used herein is at least 80%, at least 85%, at least 90%, at least 95%, at least 98%, or at least 99% identical to the reference sequence. Sequence identity is usually calculated with regard to the full length of the reference sequence (i.e., the sequence recited in the application), unless otherwise specified. Percentage identity, as referred to herein, can be determined, for example, using various methods of alignment known in the art, such as BLAST using the default parameters specified by the NCBI (the National Center for Biotechnology Information; http://www.ncbi.nlm.nih.gov/) [Blosum 62 matrix; gap open penalty=1 1 and gap extension penalty=1]. A “sequence variant” in the context of a nucleic acid (nucleotide) sequence has an altered sequence in which one or more of the nucleotides in the reference sequence is deleted, or substituted, or one or more nucleotides are inserted into the sequence of the reference nucleotide sequence. Nucleotides are referred to herein by the standard one-letter designation (A, C, G, or T). Due to the degeneracy of the genetic code, a “sequence variant” of a nucleotide sequence can either result in a change in the respective reference amino acid sequence, i.e., in an amino acid “sequence variant” or not. In certain embodiments, the nucleotide sequence variants are variants that do not result in amino acid sequence variants (i.e., silent mutations). However, nucleotide sequence variants leading to “non-silent” mutations are also within the scope, in particular such nucleotide sequence variants, which result in an amino acid sequence, which is at least 80%, at least 85%, at least 90%, at least 95%, at least 98%, or at least 99% identical to the reference amino acid sequence. A “sequence variant” in the context of an amino acid sequence has an altered sequence in which one or more of the amino acids is deleted, substituted or inserted in comparison to the reference amino acid sequence. As a result of the alterations, such a sequence variant has an amino acid sequence which is at least 80%, at least 85%, at least 90%, at least 95%, at least 98%, or at least 99% identical to the reference amino acid sequence. For example, per 100 amino acids of the reference sequence a variant sequence having no more than 10 alterations, i.e., any combination of deletions, insertions, or substitutions, is “at least 90% identical” to the reference sequence.

[0026] While it is possible to have non-conservative amino acid substitutions, in certain embodiments, the substitutions are conservative amino acid substitutions, in which the substituted amino acid has similar structural or chemical properties with the corresponding amino acid in the reference sequence. By way of example, conservative amino acid substitutions involve substitution of one aliphatic or hydrophobic amino acids, e.g., alanine, valine, leucine, and isoleucine, with another; substitution of one hydroxyl-containing amino acid, e.g., serine and threonine, with another; substitution of one acidic residue, e.g., glutamic acid or aspartic acid, with another; replacement of one amide-containing residue, e.g., asparagine and glutamine, with another; replacement of one aromatic residue, e.g., phenylalanine and tyrosine, with another; replacement of one basic residue, e.g., lysine, arginine, and histidine, with another; and replacement of one small amino acid, e.g., alanine, serine, threonine, methionine, and glycine, with another.

[0027] Amino acid sequence insertions include amino- and/or carboxyl-terminal fusions ranging in length from one residue to polypeptides containing a hundred or more residues, as well as intrasequence insertions of single or multiple amino acid residues. Examples of terminal insertions include the fusion to the N- or C-terminus of an amino acid sequence to a reporter molecule or an enzyme.

[0028] Unless otherwise stated, alterations in the sequence variants do not abolish the functionality of the respective reference sequence, for example, in the present case, the functionality of an antigen or vector disclosed herein. Guidance in determining which nucleotides and amino acid residues, respectively, may be substituted, inserted, or deleted without abolishing such functionality can be found by using computer programs well known in the art.

[0029] The nucleotide sequences of the present disclosure may be codon optimized, for example the codons may be optimized for use in human cells. For example, any viral or bacterial sequence may be so altered. Many viruses, including HIV and other lentiviruses, use a large number of rare codons and, by altering these codons to correspond to codons commonly used in the desired subject, enhanced expression of antigens may be achieved as described in Andre, S et al. (Increased Immune Response Elicited by DNA Vaccination with a Synthetic gp120 Sequence with Optimized Codon Usage. J Virol. 72, 1497-1503 (1998)).

[0030] As used herein, a nucleic acid sequence or an amino acid sequence “derived from” a designated nucleic acid, peptide, polypeptide, or protein refers to the origin of the nucleic acid, peptide, polypeptide, or protein. In some embodiments, the nucleic acid sequence or amino acid sequence which is derived from a particular sequence has an amino acid sequence that is essentially identical to that sequence or a portion thereof, from which it is derived, whereby “essentially identical” includes sequence variants as defined above. In certain embodiments, the nucleic acid sequence or amino acid sequence which is derived from a particular peptide or protein is derived from the corresponding domain in the particular peptide or protein. Thereby, “corresponding” refers in particular to the same functionality. For example, an “extracellular domain” corresponds to another “extracellular domain” (of another protein), or a “transmembrane domain” corresponds to another “transmembrane domain” (of another protein). “Corresponding” parts of peptides, proteins, and nucleic acids are thus identifiable to one of ordinary skill in the art. Likewise, sequences “derived from” other sequences are usually identifiable to one of ordinary skill in the art as having its origin in the sequence.

[0031] In some embodiments, a nucleic acid sequence or an amino acid sequence derived from another nucleic acid, peptide, polypeptide, or protein may be identical to the starting nucleic acid, peptide, polypeptide, or protein (from which it is derived). However, a nucleic acid sequence or an amino acid sequence derived from another nucleic acid, peptide, polypeptide, or protein may also have one or more mutations relative to the starting nucleic acid, peptide, polypeptide, or protein (from which it is derived), in particular a nucleic acid sequence or an amino acid sequence derived from another nucleic acid, peptide, polypeptide, or protein may be a functional sequence variant as described above of the starting nucleic acid, peptide, polypeptide, or protein (from which it is derived). For example, in a peptide/protein one or more amino acid residues may be substituted with other amino acid residues or one or more amino acid residue insertions or deletions may occur.

[0032] As used herein, the term “mutation” relates to a change in the nucleic acid sequence and/or in the amino acid sequence in comparison to a reference sequence, e.g., a corresponding genomic sequence. A mutation, e.g., in comparison to a genomic sequence, may be, for example, a (naturally occurring) somatic mutation, a spontaneous mutation, an induced mutation, e.g., induced by enzymes, chemicals, or radiation, or a mutation obtained by site-directed mutagenesis (molecular biology methods for making specific and intentional changes in the nucleic acid sequence and/or in the amino acid sequence). Thus, the terms “mutation” or “mutating” shall be understood to also include physically making a mutation, e.g., in a nucleic acid sequence or in an amino acid sequence. A mutation includes substitution, deletion, and insertion of one or more nucleotides or amino acids as well as inversion of several successive nucleotides or amino acids. Some types of coding sequence mutations include point mutations (differences in individual nucleotides or amino acids); silent mutations (differences in nucleotides that do not result in an amino acid changes); deletions (differences in which one or more nucleotides or amino acids are missing, up to and including a deletion of the entire coding sequence of a gene); frameshift mutations (differences in which deletion of a number of nucleotides indivisible by 3 results in an alteration of the amino acid sequence). A mutation that results in a difference in an amino acid may also be called an amino acid substitution mutation. Amino acid substitution mutations may be described by the amino acid change relative to wild type at a particular position in the amino acid sequence. To achieve a mutation in an amino acid sequence, a mutation may be introduced into the nucleotide sequence encoding said amino acid sequence in order to express a (recombinant) mutated polypeptide. A mutation may be achieved, e.g., by altering, e.g., by site-directed mutagenesis, a codon of a nucleic acid molecule encoding one amino acid to result in a codon encoding a different amino acid, or by synthesizing a sequence variant, e.g., by knowing the nucleotide sequence of a nucleic acid molecule encoding a polypeptide and by designing the synthesis of a nucleic acid molecule comprising a nucleotide sequence encoding a variant of the polypeptide without the need for mutating one or more nucleotides of a nucleic acid molecule.

[0033] The term “recombinant”, as used herein (e.g., a recombinant protein, a recombinant nucleic acid, a recombinant antibody, etc.), refers to any molecule (protein, nucleic acid, antibody, etc.) that is prepared, expressed, created, or isolated by recombinant means, and which is not naturally occurring. With reference to a nucleic acid or polypeptide, “recombinant” refers to one that has a sequence that is not naturally occurring or has a sequence that is made by an artificial combination of two or more otherwise separated segments of sequence, for example a CMV vector comprising a heterologous antigen. This artificial combination is often accomplished by chemical synthesis or, more commonly, by the artificial manipulation of isolated segments of nucleic acids, e.g., by genetic engineering techniques. A recombinant polypeptide may also refer to a polypeptide that has been made using recombinant nucleic acids, including recombinant nucleic acids transferred to a host organism that is not the natural source of the polypeptide (for example, nucleic acids encoding polypeptides that form a CMV vector comprising a heterologous antigen).

[0034] As used herein, the term “vector” refers to a carrier by which into which nucleic acid molecules of particular sequence can be incorporated and then introduced into a host cell, thereby producing a transformed host cell. A vector may include nucleic acid sequences that permit it to replicate in a host cell, such as an origin of replication. A vector may also include one or more selectable marker genes and other genetic elements known in the art, including promoter elements that direct nucleic acid expression. Vectors can be viral vectors, such as CMV vectors. Viral vectors may be constructed from wild type or attenuated virus, including replication deficient virus.

[0035] As the term “operably linked” is used herein, a first nucleic acid sequence is operably linked with a second nucleic acid sequence when the first nucleic acid sequence is placed in such a way that it has an effect upon the second nucleic acid sequence. Operably linked DNA sequences may be contiguous, or they may operate at a distance.

[0036] As used herein, the term “promoter” may refer to any of a number of nucleic acid control sequences that directs transcription of a nucleic acid. Typically, a eukaryotic promoter includes necessary nucleic acid sequences near the start site of transcription, such as, in the case of a polymerase II type promoter, a TATA element or any other specific DNA sequence that is recognized by one or more transcription factors. Expression by a promoter may be further modulated by enhancer or repressor elements. Numerous examples of promoters are available and well known to those of ordinary skill in the art. A nucleic acid comprising a promoter operably linked to a nucleic acid sequence that codes for a particular polypeptide may be termed an expression vector. Promoters can be from CMV genes, including but not limited to UL82 and UL78.

[0037] As used herein, the terms “cell,” “cell line,” and “cell culture” are used interchangeably and all such designations include progeny. Thus, the words “transformants” and “transformed cells” include the primary subject cell and cultures derived therefrom without regard for the number of transfers. It is also understood that all progeny may not be precisely identical in DNA content, due to deliberate or inadvertent mutations. Variant progeny that have the same function or biological activity as screened for in the originally transformed cell are included. Where distinct designations are intended, it will be clear from the context.

[0038] As used herein, the term “microRNA” refers to a major class of biomolecules involved in control of gene expression. For example, in human heart, liver, or brain, miRNAs play a role in tissue specification or cell lineage decisions. In addition, miRNAs influence a variety of processes, including early development, cell proliferation and cell death, and apoptosis and fat metabolism. The large number of miRNA genes, the diverse expression patterns, and the abundance of potential miRNA targets suggest that miRNAs may be a significant source of genetic diversity. A mature miRNA is typically an 8-25 nucleotide non-coding RNA that regulates expression of an mRNA including sequences complementary to the miRNA. These small RNA molecules are known to control gene expression by regulating the stability and/or translation of mRNAs. For example, miRNAs bind to the 3′ UTR of target mRNAs and suppress translation. MiRNAs may also bind to target mRNAs and mediate gene silencing through the RNAi pathway. MiRNAs may also regulate gene expression by causing chromatin condensation.

[0039] A miRNA silences translation of one or more specific mRNA molecules by binding to a miRNA recognition element (MRE,) which is defined as any sequence that directly base pairs with and interacts with the miRNA somewhere on the mRNA transcript. Often, the MRE is present in the 3′ untranslated region (UTR) of the mRNA, but it may also be present in the coding sequence or in the 5′ UTR. MREs are not necessarily perfect complements to miRNAs, usually having only a few bases of complementarity to the miRNA and often containing one or more mismatches within those bases of complementarity. The MRE may be any sequence capable of being bound by a miRNA sufficiently that the translation of a gene to which the MRE is operably linked (such as a CMV gene that is essential or augmenting for growth in vivo) is repressed by a miRNA silencing mechanism such as the RISC.

[0040] The term “vaccine” as used herein is typically understood to be a prophylactic or therapeutic material providing at least one antigen or immunogen. The antigen or immunogen may be derived from any material that is suitable for vaccination. For example, the antigen or immunogen may be derived from a pathogen, such as from bacteria or virus particles, etc., or from a tumor or cancerous tissue. The antigen or immunogen stimulates the body's adaptive immune system to provide an adaptive immune response. In particular, an “antigen” or an “immunogen” refers typically to a substance which may be recognized by the immune system (e.g., the adaptive immune system), and which is capable of triggering an antigen-specific immune response, e.g., by formation of antibodies and/or antigen-specific T cells as part of an adaptive immune response. Typically, an antigen may be or may comprise a peptide or protein which may be presented by the MHC to T-cells. Vaccines can be used prophylactically or therapeutically. Thus, vaccines can be used reduce the likelihood of developing a disease (such as a tumor or pathological infection) or to reduce the severity of symptoms of a disease or condition, limit the progression of the disease or condition (such as a tumor or a pathological infection), or limit the recurrence of a disease or condition (such as a tumor). In particular embodiments, a vaccine comprises a replication-deficient CMV expressing a heterologous antigen. In particular embodiments, a vaccine comprises a replication-deficient CMV expressing a fusion protein comprising Mtb antigens. As used herein, the terms “antigen” or “immunogen” are used interchangeably to refer to a substance, typically a protein, which is capable of inducing an immune response in a subject. The term also refers to proteins that are immunologically active in the sense that once administered to a subject (either directly or by administering to the subject a nucleotide sequence or vector that encodes the protein) the protein is able to evoke an immune response of the humoral and/or cellular type directed against that protein.

[0041] As used herein, “heterologous” or “exogenous” nucleic acid molecule, construct, or sequence refers to a nucleic acid molecule or portion of a nucleic acid molecule that is not native to a second nucleic acid molecule or to a host cell, depending on the context, but may be homologous to a nucleic acid molecule or portion of the second nucleic acid molecule or host cell. The source of the heterologous or exogenous nucleic acid molecule, construct, or sequence may be from a different genus or species, or may be synthetic. In certain embodiments, a heterologous or exogenous nucleic acid molecule is added (i.e., not endogenous or native) to a host cell or host genome by, for example, conjugation, transformation, transfection, electroporation, or the like, wherein the added molecule may integrate into the host genome or exist as extra-chromosomal genetic material (e.g., as a plasmid or other form of self replicating vector), and may be present in multiple copies. In addition, the term “heterologous” includes a non-native enzyme, protein, or other activity encoded by an exogenous nucleic acid molecule introduced into the second nucleic acid molecule or host cell, even if the second nucleic acid molecule or host cell encodes a homologous protein or activity.

[0042] As used herein, the term “heterologous antigen” refers to any protein or fragment thereof that is not derived from a vector to which it has been inserted. For example, in some embodiments, a “heterologous antigen” is any protein or fragment thereof that is not derived from CMV. Heterologous antigens may be pathogen-specific antigens, tumor virus antigens, tumor antigens, host self-antigens, or any other antigen.

[0043] As used herein, “antigen-specific T cell” refers to a CD8+ or CD4+ lymphocyte that recognizes a particular antigen. Generally, antigen-specific T cells specifically bind to a particular antigen presented by MHC molecules, but not other antigens presented by the same MHC.

[0044] As used herein, “immunogenic peptide” refers to peptide that comprises an allele-specific motif or other sequence, such as an N-terminal repeat, such that the peptide will bind an MHC molecule and induce a cytotoxic T lymphocyte (“CTL”) response, or a B cell response (for example, antibody production) against the antigen from which the immunogenic peptide is derived. In some embodiments, immunogenic peptides are identified using sequence motifs or other methods, such as neural net or polynomial determinations known in the art. Typically, algorithms are used to determine the “binding threshold” of peptides to select those with scores that give them a high probability of binding at a certain affinity and will be immunogenic. The algorithms are based either on the effects on MHC binding of a particular amino acid at a particular position, the effects on antibody binding of a particular amino acid at a particular position, or the effects on binding of a particular substitution in a motif-containing peptide. Within the context of an immunogenic peptide, a “conserved residue” is one which appears in a significantly higher frequency than would be expected by random distribution at a particular position in a peptide. In some embodiments, a conserved residue is one where the MHC structure may provide a contact point with the immunogenic peptide.

[0045] As used herein, the term “administration” means to provide or give a subject an agent, such as a composition comprising an effective amount of an antigen or pharmaceutical composition comprising an exogenous antigen by any effective route. Exemplary routes of administration include, but are not limited to, injection (such as subcutaneous, intramuscular, intradermal, intraperitoneal, and intravenous), oral, sublingual, rectal, transdermal, intranasal, vaginal and inhalation routes.

[0046] As used herein, a “pharmaceutically acceptable carrier” of use is conventional. Remington's Pharmaceutical Sciences, by E. W. Martin, Mack Publishing Co., Easton, PA, 19th Edition, 1995, describes compositions and formulations suitable for pharmaceutical delivery of the compositions disclosed herein. In general, the nature of the carrier will depend on the particular mode of administration being employed. For instance, parenteral formulations usually comprise injectable fluids that include pharmaceutically and physiologically acceptable fluids such as water, physiological saline, balanced salt solutions, aqueous dextrose, glycerol, or the like as a vehicle. For solid compositions (such as powder, pill, tablet, or capsule forms), conventional non-toxic solid carriers may include, for example, pharmaceutical grades of mannitol, lactose, starch, or magnesium stearate. In addition to biologically neutral carriers, pharmaceutical compositions to be administered may contain minor amounts of non-toxic auxiliary substances, such as wetting or emulsifying agents, preservatives, and pH buffering agents and the like, for example sodium acetate or sorbitan monolaurate.

[0047] Doses are often expressed in relation to bodyweight. Thus, a dose which is expressed as [g, mg, or other unit]/kg (or g, mg, etc.) usually refers to [g, mg, or other unit] “per kg (or g, mg, etc.) bodyweight”, even if the term “bodyweight” is not explicitly mentioned.

[0048] The term “disease” as used herein is intended to be generally synonymous, and is used interchangeably with, the terms “disorder” and “condition” (as in medical condition), in that all reflect an abnormal condition of the human or animal body or of one of its parts that impairs normal functioning, is typically manifested by distinguishing signs and symptoms, and causes the human or animal to have a reduced duration or quality of life.

[0049] As used herein, “tuberculosis” means a disease that is generally caused by Mycobacterium tuberculosis that usually infects the lungs. However, other “atypical” mycobacteria such as M. kansasii may produce a similar clinical and pathologic appearance of disease. Transmission of M. tuberculosis occurs by the airborne route in confined areas with poor ventilation. In more than 90% of cases, following infection with M. tuberculosis, the immune system prevents development of disease from M. tuberculosis, often called, active tuberculosis. However, not all of the M. tuberculosis is killed and, thus tiny, hard capsules are formed. “Primary tuberculosis” is seen as disease that develops following an initial infection, usually in children. The initial focus of infection is a small subpleural granuloma accompanied by granulomatous hilar lymph node infection. Together, these make up the Ghon complex. In nearly all cases, these granulomas resolve and there is no further spread of the infection. “Secondary tuberculosis” is seen mostly in adults as a reactivation of previous infection (or reinfection), particularly when health status declines. The granulomatous inflammation is much more florid and widespread. Typically, the upper lung lobes are most affected, and cavitation can occur. Dissemination of tuberculosis outside of the lungs can lead to the appearance of a number of uncommon findings with characteristic patterns that include skeletal tuberculosis, genital tract tuberculosis, urinary tract tuberculosis, central nervous system (CNS) tuberculosis, gastrointestinal tuberculosis, adrenal tuberculosis, scrofula, and cardiac tuberculosis. “Latent” tuberculosis is an Mtb infection in an individual that can be detected by a diagnostic assay, such as, but not limited to a tuberculin skin test (TST) wherein the infection does not produce symptoms in that individual. “Active” tuberculosis is a symptomatic Mtb infection in a subject. Microscopically, the inflammation produced with TB infection is granulomatous, with epithelioid macrophages and Langhans giant cells along with lymphocytes, plasma cells, maybe a few polymorphonuclear cells, fibroblasts with collagen, and characteristic caseous necrosis in the center. The inflammatory response is mediated by a type IV hypersensitivity reaction, and skin testing is based on this reaction. In some examples, tuberculosis can be diagnosed by a skin test, an acid fast stain, an auramine stain, or a combination thereof. The most common specimen screened is sputum, but the histologic stains can also be performed on tissues or other body fluids. “Pulmonary” tuberculosis refers to any bacteriologically confirmed or clinically diagnosed case of tuberculosis involving the lungs, including the lung parenchyma and/or the tracheobronchial tree. “Extrapulmonary” tuberculosis refers to any bacteriologically confirmed or clinically diagnosed case of tuberculosis involving organs other than the lungs, including, but not limited to, the pleura, lymph nodes, abdomen, genitourinary tract, skin, joints, bones, and/or meninges.

[0050] As used herein, “recurrent” tuberculosis, refers to the reactivation of an endogenous, primary M. tuberculosis infection or to recent exogenous re-infection with M. tuberculosis. Recurrent tuberculosis also refers to “postprimary tuberculosis” which may occur many years after a primary infection.

[0051] As used herein, “adjunct” refers to a treatment used together with the primary treatment wherein the purpose of the adjunct treatment is to assist the primary treatment.

### II. Tuberculosis Antigens

[0052] Disclosed herein are fusion proteins comprising Mycobacterium tuberculosis (Mtb) antigens and nucleic acids encoding the same.

[0053] In some embodiments, the present disclosure provides a fusion protein comprising one or more of Mtb Ag85A, ESAT-6, Rv3407, Rv2626c, RpfA, RpfD, Ra12, TbH9, and Ra35, or portions or fragments thereof.

[0054] Ag85A is a Mtb acetyltransferase enzyme that forms a complex with Ag85B and Ag85C and is involved in the synthesis of components of the mycobacterial cell envelope (see, e.g., Elamin, A A et al., The Mycobacterium tuberculosis Ag85A is a novel diacylglycerol acyltransferase involved in lipid body formation. Molecular Microbiology 81, 1577-1592 (2011)). As used herein, “Ag85A” may refer to the enzyme or an amino acid sequence encoding an Ag85A protein or peptide, or portions thereof, depending on the context. In some embodiments, Ag85A refers to an amino acid sequence according to UniProtKB-P9WQP3 (A85A_MYCTU) (SEQ ID NO:1). In some embodiments, Ag85A refers to a fragment of the amino acid sequence according to SEQ ID NO:1. In some embodiments, Ag85A refers to the amino acid sequence according to SEQ ID NO:11. In some embodiments, Ag85A refers to the amino acid sequence according to SEQ ID NO:12. In some embodiments, Ag85A refers to an amino acid sequence having at least 90%, at least 91%, at least 92%, at least 93%, at least 94%, at least 95%, at least 96%, at least 97%, at least 98%, at least 99%, or 100% identity to the amino acid sequence according to SEQ ID NO:1, or a fragment thereof. In some embodiments, Ag85A refers to an amino acid sequence having at least 90%, at least 91%, at least 92%, at least 93%, at least 94%, at least 95%, at least 96%, at least 97%, at least 98%, at least 99%, or 100% identity to the amino acid sequence according to SEQ ID NO:11. In some embodiments, Ag85A refers to an amino acid sequence having at least 90%, at least 91%, at least 92%, at least 93%, at least 94%, at least 95%, at least 96%, at least 97%, at least 98%, at least 99%, or 100% identity to the amino acid sequence according to SEQ ID NO:12.

[0055] ESAT-6 is a secreted Mtb protein associated with pathogenic virulence and modulation of host immune responses (Sreejit, G et al. The ESAT-6 Protein of Mycobacterium tuberculosis Interacts with Beta-2-Microglobulin (02M) Affecting Antigen Presentation Function of Macrophage. PLoS Pathog 10, e1004446 (2014)). As used herein, “ESAT-6” may refer to the protein or peptide or an amino acid sequence encoding an ESAT-6 protein or peptide, or portions thereof, depending on the context. In some embodiments, ESAT-6 refers to the amino acid sequence according to UniProtKB-P9WNK7 (ESXA_MYCTU) (SEQ ID NO:2). In some embodiments, ESAT-6 refers to a fragment of the amino acid sequence according to SEQ ID NO:2. In some embodiments, ESAT-6 refers to the amino acid sequence according to SEQ ID NO:13. In some embodiments, ESAT-6 refers to an amino acid sequence having at least 90%, at least 91%, at least 92%, at least 93%, at least 94%, at least 95%, at least 96%, at least 97%, at least 98%, at least 99%, or 100% identity to the amino acid sequence according to SEQ ID NOs:2, or a fragment thereof. In some embodiments, ESAT-6 refers to an amino acid sequence having at least 90%, at least 91%, at least 92%, at least 93%, at least 94%, at least 95%, at least 96%, at least 97%, at least 98%, at least 99%, or 100% identity to the amino acid sequence according to SEQ ID NO:13.

[0056] Rv3407 is a Mtb antigen (Mollenkopf, H J et al. Application of Mycobacterial Proteomics to Vaccine Design: Improved Protection by Mycobacterium bovis BCG Prime-Rv3407 DNA Boost Vaccination against Tuberculosis. Infection and Immunity 72, 6471-6479 (2004)). As used herein, “Rv3407” may refer to the antigenic protein or peptide or an amino acid sequence encoding an Rv3407 protein or peptide, or portions thereof, depending on the context. In some embodiments, Rv3407 refers to the amino acid sequence according to UniProtKB-P9WF23 (VPB47_MYCTU) (SEQ ID NO:3). In some embodiments, Rv3407 refers to a fragment of the amino acid sequence according to SEQ ID NO:3. In some embodiments, Rv3407 refers to the amino acid sequence according to SEQ ID NO: 14. In some embodiments, Rv3407 refers to an amino acid sequence having at least 90%, at least 91%, at least 92%, at least 93%, at least 94%, at least 95%, at least 96%, at least 97%, at least 98%, at least 99%, or 100% identity to the amino acid sequence according to SEQ ID NOs:3, or a fragment thereof. In some embodiments, Rv3407 refers to an amino acid sequence having at least 90%, at least 91%, at least 92%, at least 93%, at least 94%, at least 95%, at least 96%, at least 97%, at least 98%, at least 99%, or 100% identity to the amino acid sequence according to SEQ ID NO:14.

[0057] Rv2626c has been identified as a Mtb latency antigen (Amiano, N O et al. IFN-γ and IgG responses to Mycobacterium tuberculosis latency antigen Rv2626c differentiate remote from recent tuberculosis infection. Sci Rep 10, 7472 (2020)). As used herein, “Rv2626c” may refer to the antigenic protein or peptide or an amino acid sequence encoding an Rv2626c protein or peptide, or portions thereof, depending on the context. In some embodiments, Rv2626c refers to the amino acid sequence according to UniProtKB-P9WJA3 (HRP1_MYCTU) (SEQ ID NO:4). In some embodiments, Rv2626c refers to a fragment of the amino acid sequence according to SEQ ID NO:4. In some embodiments, Rv2626c refers to the amino acid sequence according to SEQ ID NO:15. In some embodiments, Rv2626c refers to an amino acid sequence having at least 90%, at least 91%, at least 92%, at least 93%, at least 94%, at least 95%, at least 96%, at least 97%, at least 98%, at least 99%, or 100% identity to the amino acid sequence according to SEQ ID NOs:4, or a fragment thereof. In some embodiments, Rv2626c refers to an amino acid sequence having at least 90%, at least 91%, at least 92%, at least 93%, at least 94%, at least 95%, at least 96%, at least 97%, at least 98%, at least 99%, or 100% identity to the amino acid sequence according to SEQ ID NO:15.

[0058] RpfA and RpfD belong to a family of Mtb proteins involved in virulence and resuscitation from dormancy but generally not necessary for in vitro growth (Kana, B D et al. The resuscitation-promoting factors of Mycobacterium tuberculosis are required for virulence and resuscitation from dormancy but are collectively dispensable for growth in vitro. Mol Microbiol. 67, 672-684 (2008)). As used herein, “RpfA” may refer to the protein or peptide or an amino acid sequence encoding an RpfA protein or peptide, or portions thereof, depending on the context. RpfA has variable expression in Mtb strains. RpfA in Mtb strains may be full-length or include only the C-terminus, only the N-terminus, and/or lack a central portion of the protein. In some embodiments, RpfA refers to the amino acid sequence according to UniProtKB-P9WG31 (RPFA_MYCTU) (SEQ ID NO:5). In some embodiments, RpfA refers to a fragment of the amino acid sequence according to SEQ ID NO:5. In some embodiments, RpfA refers to the amino acid sequence according to SEQ ID NO:16. In some embodiments, RpfA refers to an amino acid sequence having at least 90%, at least 91%, at least 92%, at least 93%, at least 94%, at least 95%, at least 96%, at least 97%, at least 98%, at least 99%, or 100% identity to the amino acid sequence according to SEQ ID NOs:5, or a fragment thereof. In some embodiments, RpfA refers to an amino acid sequence having at least 90%, at least 91%, at least 92%, at least 93%, at least 94%, at least 95%, at least 96%, at least 97%, at least 98%, at least 99%, or 100% identity to the amino acid sequence according to SEQ ID NO:16.

[0059] As used herein, “RpfD” may refer to the protein or peptide or an amino acid sequence encoding an RpfD protein or peptide, or portions thereof, depending on the context. In some embodiments, RpfD refers to the amino acid sequence according to UniProtKB-P9WG27 (RPFD_MYCTU) (SEQ ID NO:6). In some embodiments, RpfD refers to a fragment of the amino acid sequence according to SEQ ID NO:6. In some embodiments, RpfD refers to the amino acid sequence according to SEQ ID NO:17. In some embodiments, RpfD refers to an amino acid sequence having at least 90%, at least 91%, at least 92%, at least 93%, at least 94%, at least 95%, at least 96%, at least 97%, at least 98%, at least 99%, or 100% identity to the amino acid sequence according to SEQ ID NOs:6, or a fragment thereof. In some embodiments, RpfD refers to an amino acid sequence having at least 90%, at least 91%, at least 92%, at least 93%, at least 94%, at least 95%, at least 96%, at least 97%, at least 98%, at least 99%, or 100% identity to the amino acid sequence according to SEQ ID NO:17.

[0060] Ra12 refers to a C-terminal portion of Mtb32A, typically comprising the last approximately 132 amino acids of Mtb32A (International Application Publication No. WO2006/117240A2, which is incorporated herein by reference for teachings related to Ra12 and Ra35 antigens and fusions comprising the same). Mtb32A is a Mtb serine protease (Skeiky, Y A W et al. Cloning, Expression, and Immunological Evaluation of Two Putative Secreted Serine Protease Antigens of Mycobacterium tuberculosis. Infection and Immunity 67, 3998-4007 (1999)). An example is the Mtb32A sequence corresponding to UniProtKB-007175 (007175_MYCTU) (SEQ ID NO:7). As used herein, “Ra12” may refer to the protein or peptide or an amino acid sequence encoding a Ra12 protein or peptide, or portions thereof, depending on the context. In some embodiments, Ra12 refers to the amino acid sequence according to SEQ ID NO:23. In some embodiments, Ra12 refers to a fragment of the amino acid sequence according to SEQ ID NO:23. In some embodiments, Ra12 refers to an amino acid sequence having at least 90%, at least 91%, at least 92%, at least 93%, at least 94%, at least 95%, at least 96%, at least 97%, at least 98%, at least 99%, or 100% identity to the amino acid sequence according to SEQ ID NO:23.

[0061] Ra35 refers to an N-terminal portion of Mtb32A (International Application Publication No. WO2006/117240A2). As used herein, “Ra35” may refer to the protein or peptide or an amino acid sequence encoding a Ra35 protein or peptide, or portions thereof, depending on the context. In some embodiments, Ra35 refers to the amino acid sequence according to SEQ ID NO:25. In some embodiments, Ra35 refers to a fragment of the amino acid sequence according to SEQ ID NO:25. In some embodiments, Ra35 refers to an amino acid sequence having at least 90%, at least 91%, at least 92%, at least 93%, at least 94%, at least 95%, at least 96%, at least 97%, at least 98%, at least 99%, or 100% identity to the amino acid sequence according to SEQ ID NO:25.

[0062] In some embodiments, Ra35 refers to an amino acid sequence according to SEQ ID NO:26. In some embodiments, Ra35 refers to a fragment of the amino acid sequence according to SEQ ID NO:26. In some embodiments, Ra35 refers to an amino acid sequence having at least 90%, at least 91%, at least 92%, at least 93%, at least 94%, at least 95%, at least 96%, at least 97%, at least 98%, at least 99%, or 100% identity to the amino acid sequence according to SEQ ID NO:26.

[0063] TbH9 (also known as Mtb39a or PPE18) is a member of the mycobacterial proline-proline-glutamic acid (PPE) family of proteins and appears to be involved in intracellular survival of Mtb (Bhat, K H et al. Role of PPE18 Protein in Intracellular Survival and Pathogenicity of Mycobacterium tuberculosis in Mice. PLoS ONE 7, e52601 (2012)). TbH9 (Mtb39a) is highly homologous to Mtb39b and Mtb39c, which, together comprise the Mtb39 gene family. As used herein, “TbH9” may refer to the protein or peptide or an amino acid sequence encoding an TbH9 protein or peptide, or portions thereof, depending on the context. In some embodiments, TbH9 refers to the amino acid sequence according to UniProtKB-L7N675 (PPE18_MYCTU) (SEQ ID NO:8). In some embodiments, TbH9 refers to a fragment of the amino acid sequence according to SEQ ID NO:8. In some embodiments, TbH9 refers to the amino acid sequence according to SEQ ID NO:24. In some embodiments, TbH9 refers to an amino acid sequence having at least 90%, at least 91%, at least 92%, at least 93%, at least 94%, at least 95%, at least 96%, at least 97%, at least 98%, at least 99%, or 100% identity to the amino acid sequence according to SEQ ID NOs:8, or a fragment thereof. In some embodiments, TbH9 refers to an amino acid sequence having at least 90%, at least 91%, at least 92%, at least 93%, at least 94%, at least 95%, at least 96%, at least 97%, at least 98%, at least 99%, or 100% identity to the amino acid sequence according to SEQ ID NO:24.

[0064] Mtb72f is a fusion protein comprising M. tuberculosis proteins Mtb32a and TbH9. Mtb72f was constructed by fusing TbH9 with C- and N-terminal portions of Mtb32a as follows: Mtb32 C-terminal end-Mtb39- Mtb32 N-terminal end. An open reading frame (ORF) encoding an approximately 14-kDa C-terminal fragment of Mtb32a was sequentially linked to the full length ORF of TbH9 followed by an approximately 20-kDa N-terminal portion of Mtb32a. As used herein, “Mtb72f” may refer to the antigenic fusion protein or peptide or an amino acid sequence encoding an Mtb72f protein or peptide, or portions thereof, depending on the context. In some embodiments, Mtb72f refers to the amino acid sequence according to SEQ ID NO:18. In some embodiments, Mtb72f refers to a fragment of the amino acid sequence according to SEQ ID NO:18. In some embodiments, Mtb72f refers to an amino acid sequence having at least 90%, at least 91%, at least 92%, at least 93%, at least 94%, at least 95%, at least 96%, at least 97%, at least 98%, at least 99%, or 100% identity to the amino acid sequence according to SEQ ID NO:18, or a fragment thereof.

[0065] Mtb72f may also refer to an Mtb72f wherein the methionine at amino acid position 1 has been removed according to SEQ ID NO: 19. In some embodiments, Mtb72f refers to a fragment of the amino acid sequence according to SEQ ID NO:19. In some embodiments, Mtb72f refers to an amino acid sequence having at least 90%, at least 91%, at least 92%, at least 93%, at least 94%, at least 95%, at least 96%, at least 97%, at least 98%, at least 99%, or 100% identity to the amino acid sequence according to SEQ ID NO:19, or a fragment thereof.

[0066] M72 is a variant of Mtb72f that includes a two-residue histidine tag at the N-terminus and a serine to alanine substitution at amino acid position 710. The C-terminal portion of Mtb32a and the full length ORF of TbH9 are otherwise the same sequence as in Mtb72f (SEQ ID NO:18). The N-terminal portion of Mtb32a contains the S710A substitution. As used herein, “M72” may refer to the antigenic fusion protein or peptide or an amino acid sequence encoding an M72 protein or peptide, or portions thereof, depending on the context. In some embodiments, M72 refers to the amino acid sequence according to SEQ ID NO:21. In some embodiments, M72 refers to a fragment of the amino acid sequence according to SEQ ID NO:21. In some embodiments, M72 refers to an amino acid sequence having at least 90%, at least 91%, at least 92%, at least 93%, at least 94%, at least 95%, at least 96%, at least 97%, at least 98%, at least 99%, or 100% identity to the amino acid sequence according to SEQ ID NO:21, or a fragment thereof.

[0067] “M72-fusion-2” is a variant of M72 with a 3 amino acid deletion at the N terminus, wherein the methionine at amino acid position 1 and the two-residue histidine tag have both been removed. In some embodiments, M72-fusion-2 refers to the amino acid sequence according to SEQ ID NO:22. In some embodiments, M72-fusion-2 refers to a fragment of the amino acid sequence according to SEQ ID NO:22. In some embodiments, M72-fusion-2 refers to an amino acid sequence having at least 90%, at least 91%, at least 92%, at least 93%, at least 94%, at least 95%, at least 96%, at least 97%, at least 98%, at least 99%, or 100% identity to the amino acid sequence according to SEQ ID NO:22, or a fragment thereof.

[0068] FIGS. 1 and 2 show non-limiting examples of fusion proteins described herein.

[0069] In some embodiments, the present disclosure provides a fusion protein comprising, consisting, or consisting essentially of Ag85A, ESAT-6, Rv3407, Rv2626c, Ra12, TbH9, Ra35, and RpfD, or fragments thereof. In some embodiments, the present disclosure provides an Ag85A-ESAT-6-Rv3407-Rv2626c-Ra12-TbH9-Ra35-RpfD fusion protein. In some embodiments, the fusion protein comprises an amino acid sequence having 90%, 91%, 92%, 93%, 94%, 95%, 96%, 97%, 98%, 99%, or 100% identity to the amino acid sequence according to SEQ ID NO:42. In some embodiments, the fusion protein comprises the amino acid sequence according to SEQ ID NO:42.

[0070] In some embodiments, the present disclosure provides a fusion protein comprising, consisting, or consisting essentially of Ag85A, ESAT-6, Rv3407, Rv2626c, RpfA, and RpfD or fragments thereof. In some embodiments, the present disclosure provides an Ag85A-ESAT-6-Rv3407-Rv2626c-RpfA-RpfD fusion protein. In some embodiments, the fusion protein comprises an amino acid sequence having 90%, 91%, 92%, 93%, 94%, 95%, 96%, 97%, 98%, 99%, or 100% identity to the amino acid sequence according to any one of SEQ ID NOs:9-10. In some embodiments, the fusion protein comprises the amino acid sequence according to SEQ ID NO:9. In some embodiments, the fusion protein comprises the amino acid sequence according to SEQ ID NO:10.

[0071] In some embodiments, the present disclosure provides a fusion protein comprising, consisting, or consisting essentially of Ag85A, ESAT-6, Rv3407, Rv2626c, RpfA, RpfD, Ra12, TbH9, and Ra35, or fragments thereof. Unless otherwise specified, the individual Mtb antigens can be present in the fusion protein in any order. Additionally, they may be connected in a C-terminus to N-terminus to C-terminus manner, with or without linkers as described herein. In some embodiments, the present disclosure provides a Ag85A-ESAT-6-Rv3407-Rv2626c-RpfA-RpfD-Ra12-TbH9-Ra35 fusion protein. In some embodiments, the fusion protein comprises (i) an amino acid sequence having 90%, 91%, 92%, 93%, 94%, 95%, 96%, 97%, 98%, 99%, or 100% identity to the amino acid sequence according to any one of SEQ ID NOs:9-10; and (ii) an amino acid sequence having 90%, 91%, 92%, 93%, 94%, 95%, 96%, 97%, 98%, 99%, or 100% identity to the amino acid sequence according to any one of SEQ ID NOs:18-22. In some embodiments, the fusion protein comprises an amino acid sequence having 90%, 91%, 92%, 93%, 94%, 95%, 96%, 97%, 98%, 99%, or 100% identity to the amino acid sequence according to SEQ ID NO:27. In some embodiments, the fusion protein comprises an amino acid sequence having 90%, 91%, 92%, 93%, 94%, 95%, 96%, 97%, 98%, 99%, or 100% identity to the amino acid sequence according to SEQ ID NO:28. In some embodiments, the fusion protein comprises an amino acid sequence having 90%, 91%, 92%, 93%, 94%, 95%, 96%, 97%, 98%, 99%, or 100% identity to the amino acid sequence according to SEQ ID NO:29. In some embodiments, the fusion protein comprises an amino acid sequence having 90%, 91%, 92%, 93%, 94%, 95%, 96%, 97%, 98%, 99%, or 100% identity to the amino acid sequence according to SEQ ID NO:30. In some embodiments, the fusion protein comprises the amino acid sequence according to SEQ ID NO:27. In some embodiments, the fusion protein comprises the amino acid sequence according to SEQ ID NO:28. In some embodiments, the fusion protein comprises the amino acid sequence according to SEQ ID NO:29. In some embodiments, the fusion protein comprises the amino acid sequence according to SEQ ID NO:30.

[0072] In some embodiments, the present disclosure provides a fusion protein comprising, consisting, or consisting essentially of Ag85A, ESAT-6, Rv3407, Rv2626c, RpfA, RpfD, and TbH9, or fragments thereof. In some embodiments, the present disclosure provides a Ag85A-ESAT-6-Rv3407-Rv2626c-RpfA-RpfD-TbH9 fusion protein. In some embodiments, the fusion protein comprises (i) an amino acid sequence having 90%, 91%, 92%, 93%, 94%, 95%, 96%, 97%, 98%, 99%, or 100% identity to the amino acid sequence according to any one of SEQ ID NOs:9-10; and (ii) an amino acid sequence having 90%, 91%, 92%, 93%, 94%, 95%, 96%, 97%, 98%, 99%, or 100% identity to the amino acid sequence according to SEQ ID NO:24. In some embodiments, the fusion protein comprises an amino acid sequence having 90%, 91%, 92%, 93%, 94%, 95%, 96%, 97%, 98%, 99%, or 100% identity to the amino acid sequence according to SEQ ID NO:31; In some embodiments, the fusion protein comprises an amino acid sequence having 90%, 91%, 92%, 93%, 94%, 95%, 96%, 97%, 98%, 99%, or 100% identity to the amino acid sequence according to SEQ ID NO:32. In some embodiments, the fusion protein comprises the amino acid sequence according to SEQ ID NO:31. In some embodiments, the fusion protein comprises the amino acid sequence according to SEQ ID NO:32.

[0073] In some embodiments, the present disclosure provides a fusion protein comprising, consisting, or consisting essentially of Ag85A, ESAT-6, Rv3407, Rv2626c, RpfD, Ra12, TbH9, and Ra35, or fragments thereof. In some embodiments, the present disclosure provides a Ag85A-ESAT-6-Rv3407-Rv2626c-RpfD-Ra12-TbH9-Ra35 fusion protein. In some embodiments, the fusion protein comprises (i) an amino acid sequence having 90%, 91%, 92%, 93%, 94%, 95%, 96%, 97%, 98%, 99%, or 100% identity to the amino acid sequence according to any one of SEQ ID NOs: 1 and 11-12; (ii) an amino acid sequence having 90%, 91%, 92%, 93%, 94%, 95%, 96%, 97%, 98%, 99%, or 100% identity to the amino acid sequence according to SEQ ID NO:2 or 13; (iii) an amino acid sequence having 90%, 91%, 92%, 93%, 94%, 95%, 96%, 97%, 98%, 99%, or 100% identity to the amino acid sequence according to SEQ ID NO:3 or 14; (iv) an amino acid sequence having 90%, 91%, 92%, 93%, 94%, 95%, 96%, 97%, 98%, 99%, or 100% identity to the amino acid sequence according to SEQ ID NO:4 or 15; (v) an amino acid sequence having 90%, 91%, 92%, 93%, 94%, 95%, 96%, 97%, 98%, 99%, or 100% identity to the amino acid sequence according to SEQ ID NO:6 or 17; (vi) an amino acid sequence having 90%, 91%, 92%, 93%, 94%, 95%, 96%, 97%, 98%, 99%, or 100% identity to the amino acid sequence according to SEQ ID NO:23; (vii) an amino acid sequence having 90%, 91%, 92%, 93%, 94%, 95%, 96%, 97%, 98%, 99%, or 100% identity to the amino acid sequence according to SEQ ID NO:8 or 24; and (viii) an amino acid sequence having 90%, 91%, 92%, 93%, 94%, 95%, 96%, 97%, 98%, 99%, or 100% identity to the amino acid sequence according to any one of SEQ ID NOs:25-26. In some embodiments, the fusion protein comprises an amino acid sequence having 90%, 91%, 92%, 93%, 94%, 95%, 96%, 97%, 98%, 99%, or 100% identity to the amino acid sequence according to SEQ ID NO:33. In some embodiments, the fusion protein comprises an amino acid sequence having 90%, 91%, 92%, 93%, 94%, 95%, 96%, 97%, 98%, 99%, or 100% identity to the amino acid sequence according to SEQ ID NO:34. In some embodiments, the fusion protein comprises an amino acid sequence having 90%, 91%, 92%, 93%, 94%, 95%, 96%, 97%, 98%, 99%, or 100% identity to the amino acid sequence according to SEQ ID NO:35. In some embodiments, the fusion protein comprises an amino acid sequence having 90%, 91%, 92%, 93%, 94%, 95%, 96%, 97%, 98%, 99%, or 100% identity to the amino acid sequence according to SEQ ID NO:36. In some embodiments, the fusion protein comprises the amino acid sequence according to SEQ ID NO:33. In some embodiments, the fusion protein comprises the amino acid sequence according to SEQ ID NO:34. In some embodiments, the fusion protein comprises the amino acid sequence according to SEQ ID NO:35. In some embodiments, the fusion protein comprises the amino acid sequence according to SEQ ID NO:36.

[0074] In some embodiments, the present disclosure provides a fusion protein comprising, consisting, or consisting essentially of Ag85A, ESAT-6, Rv3407, Rv2626c, RpfD, and TbH9, or fragments thereof. In some embodiments, the present disclosure provides a Ag85A-ESAT-6-Rv3407-Rv2626c-RpfD-TbH9 fusion protein. In some embodiments, the fusion protein comprises (i) an amino acid sequence having 90%, 91%, 92%, 93%, 94%, 95%, 96%, 97%, 98%, 99%, or 100% identity to the amino acid sequence according to any one of SEQ ID NOs:1 and 11-12; (ii) an amino acid sequence having 90%, 91%, 92%, 93%, 94%, 95%, 96%, 97%, 98%, 99%, or 100% identity to the amino acid sequence according to SEQ ID NO:2 or 13; (iii) an amino acid sequence having 90%, 91%, 92%, 93%, 94%, 95%, 96%, 97%, 98%, 99%, or 100% identity to the amino acid sequence according to SEQ ID NO:3 or 14; (iv) an amino acid sequence having 90%, 91%, 92%, 93%, 94%, 95%, 96%, 97%, 98%, 99%, or 100% identity to the amino acid sequence according to SEQ ID NO:4 or 15; (v) an amino acid sequence having 90%, 91%, 92%, 93%, 94%, 95%, 96%, 97%, 98%, 99%, or 100% identity to the amino acid sequence according to SEQ ID NO:6 or 17; and (vi) an amino acid sequence having 90%, 91%, 92%, 93%, 94%, 95%, 96%, 97%, 98%, 99%, or 100% identity to the amino acid sequence according to SEQ ID NO:8 or 24. In some embodiments, the fusion protein comprises an amino acid sequence having 90%, 91%, 92%, 93%, 94%, 95%, 96%, 97%, 98%, 99%, or 100% identity to the amino acid sequence according to SEQ ID NO:37. In some embodiments, the fusion protein comprises an amino acid sequence having 90%, 91%, 92%, 93%, 94%, 95%, 96%, 97%, 98%, 99%, or 100% identity to the amino acid sequence according to SEQ ID NO:38. In some embodiments, the fusion protein comprises the amino acid sequence according to SEQ ID NO:37. In some embodiments, the fusion protein comprises the amino acid sequence according to SEQ ID NO:38.In some embodiments, the fusion protein comprises an amino acid sequence having at least 90%, at least 91%, at least 92%, at least 93%, at least 94%, at least 95%, at least 96%, at least 97%, at least 98%, at least 99%, or 100% identity to the amino acid sequence according to any one of SEQ ID NOs:42 and 1-38.

[0075] In some embodiments, the fusion protein comprises an amino acid sequence having at least 90%, at least 91%, at least 92%, at least 93%, at least 94%, at least 95%, at least 96%, at least 97%, at least 98%, at least 99%, or 100% identity to the amino acid sequence according to SEQ ID NO:42. In some embodiments, the fusion protein consists of the amino acid sequence according to SEQ ID NO:42. In some embodiments, the fusion protein consists essentially of the amino acid sequence according to SEQ ID NO:42.

[0076] In some embodiments, the fusion protein comprises an amino acid sequence having at least 90%, at least 91%, at least 92%, at least 93%, at least 94%, at least 95%, at least 96%, at least 97%, at least 98%, at least 99%, or 100% identity to the amino acid sequence according to SEQ ID NO:27. In some embodiments, the fusion protein comprises the amino acid sequence according to SEQ ID NO:27. In some embodiments, the fusion protein consists of the amino acid sequence according to SEQ ID NO:27. In some embodiments, the fusion protein consists essentially of the amino acid sequence according to SEQ ID NO:27.

[0077] In some embodiments, the fusion protein comprises an amino acid sequence having at least 90%, at least 91%, at least 92%, at least 93%, at least 94%, at least 95%, at least 96%, at least 97%, at least 98%, at least 99%, or 100% identity to the amino acid sequence according to SEQ ID NO:28. In some embodiments, the fusion protein comprises the amino acid sequence according to SEQ ID NO:28. In some embodiments, the fusion protein consists of the amino acid sequence according to SEQ ID NO:28. In some embodiments, the fusion protein consists essentially of the amino acid sequence according to SEQ ID NO:28.

[0078] In some embodiments, the fusion protein comprises an amino acid sequence having at least 90%, at least 91%, at least 92%, at least 93%, at least 94%, at least 95%, at least 96%, at least 97%, at least 98%, at least 99%, or 100% identity to the amino acid sequence according to SEQ ID NO:29. In some embodiments, the fusion protein comprises the amino acid sequence according to SEQ ID NO:29. In some embodiments, the fusion protein consists of the amino acid sequence according to SEQ ID NO:29. In some embodiments, the fusion protein consists essentially of the amino acid sequence according to SEQ ID NO:29.

[0079] In some embodiments, the fusion protein comprises an amino acid sequence having at least 90%, at least 91%, at least 92%, at least 93%, at least 94%, at least 95%, at least 96%, at least 97%, at least 98%, at least 99%, or 100% identity to the amino acid sequence according to SEQ ID NO:30. In some embodiments, the fusion protein comprises the amino acid sequence according to SEQ ID NO:30. In some embodiments, the fusion protein consists of the amino acid sequence according to SEQ ID NO:30. In some embodiments, the fusion protein consists essentially of the amino acid sequence according to SEQ ID NO:30.

[0080] In some embodiments, the fusion protein comprises an amino acid sequence having at least 90%, at least 91%, at least 92%, at least 93%, at least 94%, at least 95%, at least 96%, at least 97%, at least 98%, at least 99%, or 100% identity to the amino acid sequence according to SEQ ID NO:31. In some embodiments, the fusion protein comprises the amino acid sequence according to SEQ ID NO:31. In some embodiments, the fusion protein consists of the amino acid sequence according to SEQ ID NO:31. In some embodiments, the fusion protein consists essentially of the amino acid sequence according to SEQ ID NO:31.

[0081] In some embodiments, the fusion protein comprises an amino acid sequence having at least 90%, at least 91%, at least 92%, at least 93%, at least 94%, at least 95%, at least 96%, at least 97%, at least 98%, at least 99%, or 100% identity to the amino acid sequence according to SEQ ID NO:32. In some embodiments, the fusion protein comprises the amino acid sequence according to SEQ ID NO:32. In some embodiments, the fusion protein consists of the amino acid sequence according to SEQ ID NO:32. In some embodiments, the fusion protein consists essentially of the amino acid sequence according to SEQ ID NO:32.

[0082] In some embodiments, the fusion protein comprises an amino acid sequence having at least 90%, at least 91%, at least 92%, at least 93%, at least 94%, at least 95%, at least 96%, at least 97%, at least 98%, at least 99%, or 100% identity to the amino acid sequence according to SEQ ID NO:33. In some embodiments, the fusion protein comprises the amino acid sequence according to SEQ ID NO:33. In some embodiments, the fusion protein consists of the amino acid sequence according to SEQ ID NO:33. In some embodiments, the fusion protein consists essentially of the amino acid sequence according to SEQ ID NO:33.

[0083] In some embodiments, the fusion protein comprises an amino acid sequence having at least 90%, at least 91%, at least 92%, at least 93%, at least 94%, at least 95%, at least 96%, at least 97%, at least 98%, at least 99%, or 100% identity to the amino acid sequence according to SEQ ID NO:34. In some embodiments, the fusion protein comprises the amino acid sequence according to SEQ ID NO:34. In some embodiments, the fusion protein consists of the amino acid sequence according to SEQ ID NO:34. In some embodiments, the fusion protein consists essentially of the amino acid sequence according to SEQ ID NO:34.

[0084] In some embodiments, the fusion protein comprises an amino acid sequence having at least 90%, at least 91%, at least 92%, at least 93%, at least 94%, at least 95%, at least 96%, at least 97%, at least 98%, at least 99%, or 100% identity to the amino acid sequence according to SEQ ID NO:35. In some embodiments, the fusion protein comprises the amino acid sequence according to SEQ ID NO:35. In some embodiments, the fusion protein consists of the amino acid sequence according to SEQ ID NO:35. In some embodiments, the fusion protein consists essentially of the amino acid sequence according to SEQ ID NO:35.

[0085] In some embodiments, the fusion protein comprises an amino acid sequence having at least 90%, at least 91%, at least 92%, at least 93%, at least 94%, at least 95%, at least 96%, at least 97%, at least 98%, at least 99%, or 100% identity to the amino acid sequence according to SEQ ID NO:36. In some embodiments, the fusion protein comprises the amino acid sequence according to SEQ ID NO:36. In some embodiments, the fusion protein consists of the amino acid sequence according to SEQ ID NO:36. In some embodiments, the fusion protein consists essentially of the amino acid sequence according to SEQ ID NO:36.

[0086] In some embodiments, the fusion protein comprises an amino acid sequence having at least 90%, at least 91%, at least 92%, at least 93%, at least 94%, at least 95%, at least 96%, at least 97%, at least 98%, at least 99%, or 100% identity to the amino acid sequence according to SEQ ID NO:37. In some embodiments, the fusion protein comprises the amino acid sequence according to SEQ ID NO:37. In some embodiments, the fusion protein consists of the amino acid sequence according to SEQ ID NO:37. In some embodiments, the fusion protein consists essentially of the amino acid sequence according to SEQ ID NO:37.

[0087] In some embodiments, the fusion protein comprises an amino acid sequence having at least 90%, at least 91%, at least 92%, at least 93%, at least 94%, at least 95%, at least 96%, at least 97%, at least 98%, at least 99%, or 100% identity to the amino acid sequence according to SEQ ID NO:38. In some embodiments, the fusion protein comprises the amino acid sequence according to SEQ ID NO:38. In some embodiments, the fusion protein consists of the amino acid sequence according to SEQ ID NO:38. In some embodiments, the fusion protein consists essentially of the amino acid sequence according to SEQ ID NO:38.

[0088] In any of the aforementioned embodiments, the fusion protein may further comprise a tag. In some embodiments, the fusion protein may further comprise a poly-His tag. In some embodiments, the poly-His tag comprises or consists of two to six His residues. In some embodiments, the poly-His tag is located at the N-terminus of the fusion protein or is inserted after an initial Met residue at the N-terminus. In any of the aforementioned embodiments, the fusion protein may further comprise a human influenza hemagglutinin (HA) tag comprising the amino acid sequence YPYDVPDYA (SEQ ID NO:40). In some embodiments, the HA tag is located at the C-terminus of the fusion protein. In some embodiments, the fusion protein may be conjugated to a tag or other imaging agent, such as biotin, fluorescent moieties, radioactive moieties, or other peptide tags.

[0089] Individual Mtb antigens may be linked together in a C-terminus to N-terminus or N- terminus to C-terminus manner without any linker. Alternately, a linker may be present between any two Mtb antigens within any of the fusion proteins disclosed herein. In some embodiments, the fusion protein may further comprise one or more linkers connecting one or more of Ag85A, ESAT-6, Rv3407, Rv2626c, RpfA, RpfD, Ra12, TbH9, and Ra35. For example, the linkers may comprise or consist of one or more amino acid residues included at the junction of two Mtb antigens. In some embodiments, the linker is encoded by a segment of DNA optionally containing one or more restrictions sites, wherein the segment of DNA is inserted between nucleic acid molecules encoding two Mtb antigens of any of the fusion proteins disclosed herein. In some embodiments, the restriction site comprises an EcoRI restriction site or an EcoRV restriction site. In some embodiments, the fusion protein comprises a linker between Ra12 and TbH9, resulting in an EcoRI restriction site. In some embodiments, the fusion protein comprises a linker between TbH9 and Ra35, resulting in an EcoRV restriction site.

[0090] In some aspects, the present disclosure provides a nucleic acid molecule encoding any of the fusion proteins disclosed herein.

[0091] In some embodiments, the fusion protein is encoded by a nucleic acid comprising a sequence having 90%, 91%, 92%, 93%, 94%, 95%, 96%, 97%, 98%, 99%, or 100% identity to the nucleic acid sequence according to SEQ ID NO:41. In some embodiments, the fusion protein consists of an amino acid sequence encoded by the nucleic acid sequence according to SEQ ID NO:41. In some embodiments, the fusion protein consists essentially of an amino acid sequence encoded by the nucleic acid sequence according to SEQ ID NO:41.

### III. Vectors

[0092] In some embodiments, the present disclosure provides vectors encoding a fusion protein as described above.

[0093] The vector may be any expression vector known in the art. For the antigens to be expressed, the protein coding sequence of the fusion protein should be “operably linked” to regulatory or nucleic acid control sequences that direct transcription and translation of the protein. A coding sequence and a nucleic acid control sequence or promoter are said to be “operably linked” when they are covalently linked in such a way as to place the expression or transcription and/or translation of the coding sequence under the influence or control of the nucleic acid control sequence. The “nucleic acid control sequence” may be any nucleic acid element, such as, but not limited to promoters, enhancers, IRES, introns, and other elements described herein that direct the expression of a nucleic acid sequence or coding sequence that is operably linked thereto. The term “promoter” refers to a group of transcriptional control modules that are clustered around the initiation site for RNA polymerase II and that when operationally linked to the protein coding sequences of the disclosure lead to the expression of the encoded protein. The expression of heterologous antigens and fusion proteins of the present disclosure may be under the control of a constitutive promoter or of an inducible promoter, which initiates transcription only when exposed to some particular external stimulus, such as, without limitation, antibiotics such as tetracycline, hormones such as ecdysone, or heavy metals. The promoter may also be specific to a particular cell-type, tissue, or organ. Many suitable promoters and enhancers are known in the art, and any such suitable promoter or enhancer may be used for expression of the transgenes of the disclosure. For example, suitable promoters and/or enhancers may be selected from the Eukaryotic Promoter Database (EPDB).

[0094] In some embodiments, the vector encoding the fusion protein is a plasmid, cosmid, phage, bacterial vector, or viral vector. In some embodiments, the vector is a viral vector, such a poxvirus, adenovirus, rubella, sendai virus, rhabdovirus, alphavirus, herpesvirus, lentivirus, retrovirus, or adeno-associated virus. In some embodiments, the vector encoding the fusion protein is a bacterial artificial chromosome (BAC). In some embodiments, the vector encoding the fusion protein is a CMV vector, e.g., a RhCMV or HCMV vector. In some embodiments, the vector encoding the fusion protein is a recombinant HCMV vector comprising a TR3 backbone.

[0095] In some embodiments, the recombinant CMV vector is or is derived from HCMV TR3. As referred to herein, “HCMV TR3” or “TR3” refers to a HCMV-TR3 vector backbone derived from the clinical isolate HCMV TR, as described in Caposio, P et al. (Characterization of a live attenuated HCMV-based vaccine platform. Scientific Reports 9, 19236 (2019)).

[0096] As described herein, recombinant CMV vectors may be characterized by the presence or absence of one or more CMV genes. CMV vectors may also be characterized by the presence or absence of one or more proteins encoded by one or more CMV genes. A protein encoded by a CMV gene may be absent due to the presence of a mutation in the nucleic acid sequence encoding the CMV gene. In some embodiments, the vector can include an ortholog or homolog of a CMV gene. Examples of CMV genes include, but are not limited to, UL82, UL128, UL130, UL146, UL147, UL 18, and UL78.

[0097] The human cytomegalovirus UL82 gene encodes pp71, a protein that is localized in the tegument domain of the virus particle. For example, the UL82 gene of the CMV TR strain is 118811 to 120490 for GenBank Accession No. KF021605.1.

[0098] Pp71 may perform one or more functions, including inhibition of Daxx repression of viral gene transcription, negative regulation of STING, and evasion of cell antiviral responses (Kalejta R F, et al. Expanding the Known Functional Repertoire of the Human Cytomegalovirus pp71 Protein. Front Cell Infect Microbiol. 2020 Mar. 12; 10:95). Deletion of UL82 or disruption of UL82 by insertion of a foreign gene at the UL82 locus results in the absence of pp71 protein and consequently reduces replication in fibroblasts, endothelial cells, epithelial cells, and astrocytes (Caposio P et al., Characterization of a live-attenuated HCMV-based vaccine platform. Sci Rep. 2019 Dec. 17; 9(1):19236). The effects of UL82 deletion or disruption are reversible by cell kinase inhibitors. The rhesus cytomegalovirus (RhCMV) gene RhCMV 110 is homologous to human CMV UL82 (Hansen S G, et al. Complete sequence and genomic analysis of rhesus cytomegalovirus. J Virol. 2003 June; 77(12):6620-36).

[0099] The human cytomegalovirus genes UL128 and UL130 encode structural components of the viral envelope (Patrone, M et al. Human cytomegalovirus UL130 protein promotes endothelial cell infection through a producer cell modification of the virion. J Virol. 79(13):8361-73 (2005); Ryckman, B J et al. Characterization of the human cytomegalovirus gH/gL/UL128-131 complex that mediates entry into epithelial and endothelial cells. J Virol. 82(1):60-70 (2008); Wang, D et al. Human cytomegalovirus virion protein complex required for epithelial and endothelial cell tropism. Proc Natl Acad Sci USA. 102(50):18153-8 (2005)). For example, the UL128 gene of the CMV TR strain is 176206 to 176964 for GenBank Accession No. KF021605.1 and the UL130 gene of the CMV TR strain is 177004 to 177648 for GenBank Accession No. KF021605.1.

[0100] The human cytomegalovirus genes UL146 and UL147 encode the CXC chemokines vCXC-1 and vCXC-2, respectively (Penfold, M E et al. Cytomegalovirus encodes a potent alpha chemokine. Proc Natl Acad Sci USA. 96(17):9839-44 (1999)). For example, the UL146 gene of the CMV TR strain is 180954 to 181307 for GenBank Accession No. KF021605.1 and the UL147 gene of the CMV TR strain is 180410 to 180889 for GenBank Accession No. KF021605.1.

[0101] The human cytomegalovirus UL18 gene encodes a type-I membrane glycoprotein that associates with 02-microglobulin and can bind endogenous peptides (Park, B et al. Human cytomegalovirus inhibits tapasin-dependent peptide loading and optimization of the MHC class I peptide cargo for immune evasion. Immunity. 20(1):71-85 (2004); Browne, H et al. A complex between the MHC class I homologue encoded by human cytomegalovirus and beta 2 microglobulin. Nature. 347(6295):770-2 (1990); Fahnestock, M L et al. The MHC class I homolog encoded by human cytomegalovirus binds endogenous peptides. Immunity. 3(5):583-90 (1995)). For example, the UL18 gene of the CMV TR strain is 24005 to 25111 for GenBank Accession No. KF021605.1.

[0102] The human cytomegalovirus UL78 gene encodes a putative G protein-coupled receptor (Chee, M S et al. Analysis of the protein-coding content of the sequence of human cytomegalovirus strain AD169. Curr Top Microbiol Immunol. 1154:125-69 (1990)) and may also have a role in viral replication (Michel, D et al. The human cytomegalovirus UL78 gene is highly conserved among clinical isolates, but is dispensable for replication in fibroblasts and a renal artery organ-culture system. J Gen Virol. 86(Pt 2):297-306 (2005)). For example, the UL78 gene of the CMV TR strain is 114247 to 115542 for GenBank Accession No. KF021605.1.

[0103] In some embodiments, the recombinant CMV vector expresses UL128 or UL130, or orthologs thereof. In some embodiments, the recombinant CMV vector expresses UL146 and UL147, or orthologs thereof. In some embodiments, the recombinant CMV vector expresses UL128, UL130, UL146, and UL147.

[0104] In some embodiments, the recombinant CMV vector (e.g., a recombinant HCMV vector or a recombinant HCMV vector comprising a TR3 backbone) does not express UL128 or UL130, or orthologs thereof, due to the presence of a mutation in the nucleic acid sequences encoding UL128 and UL130, or the orthologs thereof. In some embodiments, the CMV vector is deficient for one or more of UL146, UL147, UL18, UL78, and UL82, and orthologs thereof, due to the presence of a mutation in the nucleic acid sequence encoding UL146, UL147, UL18, UL78, or UL82, or the ortholog thereof. In some embodiments, the CMV vector is deficient for US 11, and orthologs thereof, due to the presence of a mutation in the nucleic acid sequence encoding US11, or the ortholog thereof. In the aforementioned embodiments, the mutation or mutations may be any mutation that results in a lack of expression of active proteins. Such mutations include, for example, point mutations, frameshift mutations, deletions of less than all of the sequence that encodes the protein (truncation mutations), or deletions of all of the nucleic acid sequence that encodes the protein. In some embodiments, the recombinant CMV vector (e.g., a recombinant HCMV vector or a recombinant HCMV vector comprising a TR3 backbone) expresses UL40 and US28, or orthologs thereof.

[0105] In some embodiments, the recombinant CMV vector (e.g., a recombinant HCMV vector or a recombinant HCMV vector comprising a TR3 backbone) does not express UL78, UL128, or UL130, or orthologs thereof, due to the presence of a mutation in the nucleic acid sequences encoding UL78, UL128, and UL130, or the orthologs thereof. In some further embodiments, a nucleic acid molecule encoding a fusion protein as disclosed herein is replaces UL78. In some further embodiments, the fusion protein is operably linked to and is expressed by the UL78 promoter.

[0106] In some embodiments, the recombinant CMV vector (e.g., a recombinant HCMV vector or a recombinant HCMV vector comprising a TR3 backbone) does not express UL78, UL128, or UL130, or orthologs thereof, due to the presence of a mutation in the nucleic acid sequences encoding UL78, UL128, and UL130, or the orthologs thereof. In some further embodiments, the recombinant CMV vector expresses UL18, UL82, UL146, and UL147, or orthologs thereof. In some further embodiments, a nucleic acid molecule encoding a fusion protein as disclosed herein is replaces UL78. In some further embodiments, the fusion protein is operably linked to and is expressed by the UL78 promoter.

[0107] In some embodiments, the recombinant CMV vector (e.g., a recombinant HCMV vector or a recombinant HCMV vector comprising a TR3 backbone) does not express UL82, UL128, or UL130, or orthologs thereof, due to the presence of a mutation in the nucleic acid sequences encoding UL82, UL128, and UL130, or the orthologs thereof. In some further embodiments, a nucleic acid molecule encoding a fusion protein disclosed herein is replaces UL82. In some further embodiments, the fusion protein is operably linked to and is expressed by the UL82 promoter.

[0108] A challenge for manufacturing HCMV vectors having desirable properties for vaccines is that the vectors are often designed to have reduced viral replication or growth. For example, some live attenuated HCMV-HIV vaccine vectors are engineered to be growth deficient by deletion of the HCMV gene UL82 (which encodes the tegument protein pp71), resulting in lower viral yield. pp71 is important for wild type HCMV infection because this tegument protein is translocated to the nucleus where it suppresses cellular Daxx function, thus allowing CMV immediate-early (IE) gene expression that triggers the replication cycle. Some manufacturing processes rely on functional complementation using transient transfection of MRC-5 cells with an siRNA targeting Daxx, which mimics one of the functions of HCMV pp71. Another approach is to use transfection of a mRNA encoding pp71, to enable the host cell to express the essential viral gene. Transfection of a mRNA for expressing the essential viral gene may be able to provide all of the functions of the gene that are likely to enhance the infection process, such as cell cycle stimulation, efficient virion packaging, and virus stability. In addition, protein present late in infection has the potential to be packaged in the progeny virus, which could lower the required dose of the vaccine by more efficient first round infection and establishment of persistent infection. Accordingly, in some embodiments, the present disclosure provides a method of producing a recombinant CMV viral vector, comprising: (a) introducing a mRNA encoding a pp71 protein to a cell; (b) infecting the cell with a recombinant CMV; (c) incubating the cell; and (d) collecting the recombinant CMV viral vector. In some embodiments, the nucleic acid encoding a pp71 protein is delivered to the cell using transfection. In some embodiments, the cell is a MRC-5 cell. In some embodiments, the recombinant CMV is a recombinant HCMV as described herein (e.g., a recombinant HCMV vector derived from a TR3 backbone). In some embodiments, the recombinant CMV and recombinant CMV viral vector comprises a nucleic acid encoding a heterologous pathogen-specific antigen, such as a Mtb antigen as described herein. A CMV viral vector made by such a method is also within the scope of the disclosure.

[0109] In some embodiments, the recombinant CMV vector (e.g., a recombinant HCMV vector or a recombinant HCMV vector comprising a TR3 backbone) comprises a nucleic acid sequence encoding a microRNA (miRNA) recognition element (MRE). In some embodiments, the HCMV vector comprises a nucleic acid sequence encoding an MRE that contains target sites for microRNAs expressed in endothelial cells. Examples of miRNAs expressed in endothelial cells are miR126, miR-126-3p, miR-130a, miR-210, miR-221/222, miR-378, miR-296, and miR-328. In some embodiments, the recombinant CMV vector (e.g., a recombinant HCMV vector or a recombinant HCMV vector comprising a TR3 backbone) comprises a nucleic acid sequence encoding an MRE that contains target sites for microRNAs expressed in myeloid cells. Examples of miRNAs expressed in myeloid cells are miR-142-3p, miR-223, miR-27a, miR-652, miR-155, miR-146a, miR-132, miR-21, miR-124, and miR-125.

[0110] MREs that may be included in the vectors disclosed herein may be any miRNA recognition element that silences expression in the presence of a miRNA expressed by endothelial cells or a miRNA expressed by myeloid cells. Such an MRE may be the exact complement of a miRNA. Alternatively, other sequences may be used as MREs for a given miRNA. For example, MREs may be predicted from sequences using publicly available data bases. In one example, the miRNA may be searched on the website microRNA.org (www.microrna.org). In turn, a list of mRNA targets of the miRNA will be listed. For each listed target on the page, ‘alignment details’ may be accessed and putative MREs accessed. One of ordinary skill in the art may select a validated, putative, or mutated MRE sequence from the literature that would be predicted to induce silencing in the presence of a miRNA expressed in a myeloid cell such as a macrophage. One example involves the above referenced website. The person of ordinary skill in the art may then obtain an expression construct whereby a reporter gene (such as a fluorescent protein, enzyme, or other reporter gene) has expression driven by a promoter such as a constitutively active promoter or cell specific promoter. The MRE sequence may then be introduced into the expression construct. The expression construct may be transfected into an appropriate cell, and the cell transfected with the miRNA of interest. A lack of expression of the reporter gene indicates that the MRE silences gene expression in the presence of the miRNA.

[0111] In some embodiments, the CMV vector comprises a nucleic acid sequence that does not encode any MREs.

[0112] In some embodiments, the CMV vectors described herein contain mutations that may prevent host to host spread, thereby rendering the virus unable to infect immunocompromised or other subjects that could face complications as a result of CMV infection. The CMV vectors described herein may also contain mutations that result in the presentation of immunodominant and nonimmunodominant epitopes as well as non-canonical MHC restriction. However, in some embodiments, mutations in the CMV vectors described herein do not affect the ability of the vector to reinfect a subject that has been previously infected with CMV. Such CMV mutations are described in, for example, U.S. Patent Application Publication Nos. US2013/0136768A1, US2013/0142823A1; US2014/0141038A1; and International Application Publication No. WO2014/138209A1, which are incorporated by reference herein for teachings related to these mutations.

[0113] The CMV vectors disclosed herein may be prepared by inserting DNA comprising a sequence that encodes the Mtb antigen (e.g., a fusion protein as disclosed herein) into an essential or non-essential region of the CMV genome. The method may further comprise deleting one or more regions from the CMV genome. The method may comprise in vivo recombination. Thus, the method may comprise transfecting a cell with CMV DNA in a cell-compatible medium in the presence of donor DNA comprising the heterologous DNA flanked by DNA sequences homologous with portions of the CMV genome, whereby the heterologous DNA is introduced into the genome of the CMV, and optionally then recovering CMV modified by the in vivo recombination. The method may also comprise cleaving CMV DNA to obtain cleaved CMV DNA, ligating the heterologous DNA to the cleaved CMV DNA to obtain hybrid CMV-heterologous DNA, transfecting a cell with the hybrid CMV-heterologous DNA, and optionally then recovering CMV modified by the presence of the heterologous DNA Since in vivo recombination is comprehended, the method accordingly also provides a plasmid comprising donor DNA not naturally occurring in CMV encoding a polypeptide foreign to CMV, the donor DNA is within a segment of CMV DNA that would otherwise be co-linear with an essential or non-essential region of the CMV genome such that DNA from an essential or nonessential region of CMV is flanking the donor DNA The heterologous DNA may be inserted into CMV to generate the recombinant CMV in any orientation that yields stable integration of that DNA, and expression thereof, when desired.

[0114] The DNA encoding the Mtb antigen (e.g., a fusion protein as disclosed herein) in the recombinant CMV vector may also include a promoter. The promoter may be from any source such as a herpes virus, including an endogenous cytomegalovirus (CMV) promoter, such as a human CMV (HCMV), rhesus macaque CMV (RhCMV), murine, or other CMV promoter. The promoter may also be a nonviral promoter such as the EF1α promoter. The promoter may be a truncated transcriptionally active promoter which comprises a region transactivated with a transactivating protein provided by the virus and the minimal promoter region of the full-length promoter from which the truncated transcriptionally active promoter is derived. The promoter may be composed of an association of DNA sequences corresponding to the minimal promoter and upstream regulatory sequences. A minimal promoter is composed of the CAP site plus ATA box (minimum sequences for basic level of transcription; unregulated level of transcription); “upstream regulatory sequences” are composed of the upstream element(s) and enhancer sequence(s). Further, the term “truncated” indicates that the full-length promoter is not completely present, i.e., that some portion of the full-length promoter has been removed. The truncated promoter may be derived from a herpesvirus such as MCMV or HCMV, e.g., HCMV-IE or MCMV-IE. There may be up to a 40% and even up to a 90% reduction in size, from a full-length promoter, based upon base pairs. The promoter may also be a modified non-viral promoter. As to HCMV promoters, reference is made to U.S. Pat. Nos. 5,168,062 and 5,385,839. As to transfecting cells with plasmid DNA for expression therefrom, reference is made to Felgner, J H et al. (Enhanced gene delivery and mechanism studies with a novel series of cationic lipid formulations. J Biol. Chem. 269, 2550-2561 (1994)). As to direct injection of plasmid DNA as a simple and effective method of vaccination against a variety of infectious diseases reference is made to Ulmer, J B et al. (Heterologous protection against influenza by injection of DNA encoding a viral protein. Science 259, 1745-1749 (1993)). It is therefore within the scope of this disclosure that the vector may be used by the direct injection of vector DNA. Also disclosed is an expression cassette that may be inserted into a recombinant virus or plasmid comprising a truncated transcriptionally active promoter. The expression cassette may further include a functional truncated polyadenylation signal; for instance an SV40 polyadenylation signal which is truncated, yet functional. A truncated polyadenylation signal addresses the insert size limit problems of recombinant viruses such as CMV. The expression cassette may also include heterologous DNA with respect to the virus or system into which it is inserted; and that DNA may be heterologous DNA as described herein.

[0115] It is noted that the DNA comprising the sequence encoding the fusion protein may itself include a promoter for driving expression in the CMV vector or the DNA may be limited to the coding DNA of the fusion protein. This construct may be placed in such an orientation relative to an endogenous CMV promoter that it is operably linked to the promoter and is thereby expressed. Further, multiple copies of DNA encoding the fusion protein or use of a strong or early promoter or early and late promoter, or any combination thereof, may be done so as to amplify or increase expression. Thus, the DNA encoding the fusion protein may be suitably positioned with respect to a CMV endogenous promoter, or those promoters may be translocated to be inserted at another location together with the DNA encoding the fusion protein. Nucleic acids encoding more than one fusion protein, or a fusion protein and additional antigens, may be packaged in the CMV vector.

[0116] In some embodiments, the present disclosure provides a recombinant HCMV vector comprising a nucleic acid sequence having at least 90%, 91%, 92%, 93%, 94%, 95%, 96%, 97%, 98%, 99%, or 100% identity to the nucleic acid sequence according to SEQ ID NO:44. In some embodiments, the recombinant HCMV vector comprises the nucleic acid sequence according to SEQ ID NO:44. In some embodiments, the recombinant HCMV vector consists of the nucleic acid sequence according to SEQ ID NO:44.

### IV. Pharmaceutical Compositions

[0117] The present disclosure provides, in some embodiments, a pharmaceutical composition (e.g., an immunogenic or vaccine composition) comprising a fusion protein as described herein and a pharmaceutically acceptable carrier or diluent. The present disclosure also provides, in some embodiments, a pharmaceutical composition (e.g., an immunogenic or vaccine composition) comprising vector encoding a fusion protein as described herein (e.g., a recombinant CMV vectors disclosed herein). An immunogenic or vaccine composition containing the recombinant CMV virus or vector (or an expression product thereof) elicits an immunological response (local or systemic). The response can, but need not be, protective. In other words, an immunogenic or vaccine composition elicits a local or systemic protective or therapeutic response.

[0118] Such pharmaceutical compositions may be prepared in accordance with standard techniques well known to those skilled in the pharmaceutical arts. Such compositions may be administered in dosages and by techniques well known to those skilled in the medical arts taking into consideration such factors as the breed or species, age, sex, weight, and condition of the particular patient, and the route of administration. The compositions may be administered alone, or may be co-administered or sequentially administered with other proteins or peptides, with other vectors (e.g., other CMV vectors), or with other immunological, antigenic or vaccine or therapeutic compositions. Such other compositions may include purified native antigens or epitopes or antigens or epitopes from the expression by a recombinant CMV or another vector system.

[0119] Pharmaceutical compositions as disclosed herein may be formulated so as to be used in any administration procedure known in the art. Such pharmaceutical compositions may be via a parenteral route (intradermal, intraperitoneal, intramuscular, subcutaneous, intravenous, or others). The administration may also be via a mucosal route, e.g., oral, nasal, genital, etc.

[0120] Examples of compositions include liquid preparations for orifice, e.g., oral, nasal, anal, genital, e.g., vaginal, etc., administration such as suspensions, syrups or elixirs; and, preparations for parenteral, subcutaneous, intraperitoneal, intradermal, intramuscular or intravenous administration (e.g., injectable administration) such as sterile suspensions or emulsions. In such compositions the recombinant may be in admixture with a suitable carrier, diluent, or excipient such as sterile water, physiological saline, glucose, trehalose, or the like.

[0121] Pharmaceutical compositions disclosed herein typically may comprise or contain an adjuvant and an amount of the antigen (e.g., fusion protein) or vector encoding the antigen, to elicit the desired response. In human applications, alum (aluminum phosphate or aluminum hydroxide) is a typical adjuvant. Saponin and its purified component Quil A, Freund's complete adjuvant and other adjuvants used in research and veterinary applications have toxicities which limit their potential use in human vaccines. Chemically defined preparations such as muramyl dipeptide, monophosphoryllipid A, phospholipid conjugates such as those described by Goodman-Snitkoff, G. et al. (Role of intrastructural/intermolecular help in immunization with peptide-phospholipid complexes. J Immunol. 147, 410-415 (1991)), encapsulation of the protein within a proteoliposome as described by Miller, M D et al. (Vaccination of rhesus monkeys with synthetic peptide in a fusogenic proteoliposome elicits simian immunodeficiency virus-specific CD8+ cytotoxic T lymphocytes. J Exp. Med. 176, 1739-1744 (1992)), and encapsulation of the protein in lipid vesicles such as Novasome lipid vesicles (Micro Vescular Systems, Inc., Nashua, N.H.) may also be used.

[0122] The composition may be packaged in a single dosage form for immunization by parenteral (e.g., intramuscular, intradermal or subcutaneous) administration or orifice administration, e.g., perlingual (e.g., oral), intragastric, mucosal including intraoral, intraanal, intravaginal, and the like administration. The effective dosage and route of administration are determined by the nature of the composition, by the nature of the expression product, by expression level if a vector is directly used, and by known factors, such as breed or species, age, sex, weight, condition, and nature of the subject, as well as LD50 and other screening procedures which are known and do not require undue experimentation. Dosages of expressed product may range from a few to a few hundred micrograms, e.g., 5 to 500 μg. The antigen or vector encoding the antigen may be administered in any suitable amount to achieve expression at these dosage levels. In nonlimiting examples: a CMV vector encoding the fusion protein disclosed herein may be administered in an amount of at least 102 pfu; or in a range from about 102 pfu to about 107 pfu. Other suitable carriers or diluents may be water or a buffered saline, with or without a preservative. The composition may be lyophilized for resuspension at the time of administration or may be in solution.

### V. Methods of Treatment and Other Uses

[0123] The fusion proteins and vectors (such as recombinant CMV vectors) disclosed herein may be used in methods of inducing an immunological or immune response in a subject comprising administering to the subject a composition comprising the fusion protein, the vector, or the recombinant CMV virus or vector and a pharmaceutically acceptable carrier or diluent.

[0124] As used herein, the term “subject” refers to a living multi-cellular vertebrate organisms, a category that includes both human and non-human mammals. The subject may be an animal, such as a mammal, including any mammal that can be infected with Mycobacterium tuberculosis, e.g., a primate (such as a human, a non-human primate, e.g., a monkey, or a chimpanzee), or an animal that is considered an acceptable clinical model of tuberculosis infection.

[0125] In some embodiments, the subject is human. In further embodiments, the subject is an adult 18 years old or older. In still further embodiments, the subject is an adolescent aged 13 to 17 years old.

[0126] In some embodiments, the subject resides in a geographical location where tuberculosis is not endemic. In some embodiments, the subject resides in a geographical location where tuberculosis is endemic (e.g., South Africa). As used herein, “endemic” is used to describe a disease that is constantly present in a certain geographic area or in a certain group of people.

[0127] In some embodiments the subject has tested positive for CMV. In some embodiments the patient has tested negative for CMV. CMV testing refers to assays that determine the presence of the virus in the urine, saliva, blood, sputum, or other body fluids. Non-limiting examples of CMV tests include polymerase chain reaction (PCR), e.g., a CMV-salivary PCR test.

[0128] In some embodiments the subject has a positive result from an interferon-y release assay (IGRA). In some embodiments the subject has a negative result from an interferon-y release assay. An interferon-y release assay is used to diagnose tuberculosis. T lymphocytes will release interferon-y upon exposure to specific Mycobacterium tuberculosis antigens indicating previous exposure to the Mycobacterium tuberculosis antigens tested.

[0129] In some embodiments the subject has tested positive for CMV and has a positive result from an interferon-y release assay. In some embodiments the subject has tested negative for CMV and has a negative result from an interferon-y release assay. In some embodiments the subject has tested negative for CMV and has a positive result from an interferon-y release assay. In some embodiments the subject has tested positive for CMV and has a negative result from an interferon-y release assay. In further embodiments the subject has been previously administered the bacille Calmette-Guerin vaccine (BCG). In still further embodiments, the subject has tested positive for CMV, has a negative result from an interferon-y release assay, and has additionally been previously administered the bacille Calmette-Guerin vaccine (BCG).

[0130] In some embodiments, the subject is HIV positive. In further embodiments, the subject is HIV positive and currently on anti-retroviral therapy (ART).

[0131] As used herein, the term “treatment” refers to an intervention that ameliorates a sign or symptom of a disease or pathological condition. As used herein, the terms “treatment”, “treat”, and “treating,” with reference to a disease, pathological condition or symptom, also refers to any observable beneficial effect of the treatment. The beneficial effect may be evidenced, for example, by a delayed onset of clinical symptoms of the disease in a susceptible subject, a reduction in severity of some or all clinical symptoms of the disease, a slower progression of the disease, a reduction in the number of relapses of the disease, an improvement in the overall health or well-being of the subject, or by other parameters well known in the art that are specific to the particular disease. A prophylactic treatment is a treatment administered to a subject who does not exhibit signs of a disease or exhibits only early signs, for the purpose of decreasing the risk of developing pathology. A therapeutic treatment is a treatment administered to a subject after signs and symptoms of the disease have developed.

[0132] As used herein, the terms “preventing” or “prevention” refer to the failure to develop a disease, disorder, or condition, or the reduction in the development of a sign or symptom associated with such a disease, disorder, or condition (e.g., by a clinically relevant amount), or the exhibition of delayed signs or symptoms delayed (e.g., by days, weeks, months, or years). Prevention may require the administration of more than one dose.

[0133] As used herein, the term “effective amount” refers to an amount of an agent (e.g., a fusion protein or a vector encoding a fusion protein), that is sufficient to generate a desired response, such as reduce or eliminate a sign or symptom of a condition or disease or induce an immune response to an antigen. In some examples, an “effective amount” is one that treats (including prophylaxis) one or more symptoms and/or underlying causes of any of a disorder or disease. An effective amount may be a therapeutically effective amount, including an amount that prevents one or more signs or symptoms of a particular disease or condition from developing, such as one or more signs or symptoms associated with infectious disease or cancer.

[0134] The disclosed fusion proteins or vectors may be administered in vivo, for example where the aim is to produce an immunogenic response, including a CD4+ T cell/immune and/or a CD8+ T cell/immune. For example, in some examples it may be desired to use the disclosed fusion proteins or vectors in a laboratory animal, such as rhesus macaques for preclinical testing of immunogenic compositions and vaccines using RhCMV. In other examples, it will be desirable to use the fusion proteins or vectors in human subjects, such as in clinical trials and for actual clinical use of the immunogenic compositions using HCMV.

[0135] For such in vivo applications the disclosed fusion proteins or vectors may be administered as a component of an immunogenic or pharmaceutical composition further comprising a pharmaceutically acceptable carrier. In some embodiments, the immunogenic compositions of the disclosure are useful to stimulate an immune response against the fusion protein, and may be used as one or more components of a prophylactic or therapeutic vaccine. The nucleic acids and vectors of the disclosure are particularly useful for providing genetic vaccines, i.e., vaccines for delivering the nucleic acids encoding the antigens of the disclosure to a subject, such as a human, such that the antigens are then expressed in the subject to elicit an immune response.

[0136] Immunization schedules (or regimens) are well known for animals (including humans) and may be readily determined for the particular subject and immunogenic composition. Hence, the immunogens may be administered one or more times to the subject. Preferably, there is a set time interval between separate administrations of the immunogenic composition. While this interval varies for every subject, typically it ranges from 10 days to several weeks, and is often 2, 4, 6, or 8 weeks. For humans, the interval is typically from 2 to 6 weeks. In a particularly advantageous embodiment of the present disclosure, the interval is longer, advantageously about 10 weeks, 12 weeks, 14 weeks, 16 weeks, 18 weeks, 20 weeks, 22 weeks, 24 weeks, 26 weeks, 28 weeks, 30 weeks, 32 weeks, 34 weeks, 36 weeks, 38 weeks, 40 weeks, 42 weeks, 44 weeks, 46 weeks, 48 weeks, 50 weeks, 52 weeks, 54 weeks, 56 weeks, 58 weeks, 60 weeks, 62 weeks, 64 weeks, 66 weeks, 68 weeks, or 70 weeks. The immunization regimes typically have from 1 to 6 administrations of the immunogenic composition, but may have as few as one or two or four. The methods of inducing an immune response may also include administration of an adjuvant with the immunogens. In some instances, annual, biannual, or other long interval (5-10 years) booster immunization may supplement the initial immunization protocol. The present methods also include a variety of prime-boost regimens. In these methods, one or more priming immunizations are followed by one or more boosting immunizations. The actual immunogenic composition may be the same or different for each immunization and the type of immunogenic composition (e.g., containing protein or expression vector), the route, and formulation of the immunogens may also be varied. For example, if an expression vector is used for the priming and boosting steps, it may either be of the same or different type (e.g., DNA or bacterial or viral expression vector). One useful prime-boost regimen provides for two priming immunizations, four weeks apart, followed by two boosting immunizations at 4 and 8 weeks after the last priming immunization. It should also be readily apparent to one of skill in the art that there are several permutations and combinations that are encompassed using the DNA, bacterial, and viral expression vectors of the disclosure to provide priming and boosting regimens. CMV vectors may be used repeatedly while expressing different antigens derived from different pathogens.

[0137] Accordingly, the present disclosure provides, in some embodiments, a method of generating an immune response in a subject, comprising administering to the subject any of the aforementioned fusion proteins, nucleic acids, vectors, or compositions. Also provided herein is the use of any of the aforementioned fusion proteins, nucleic acids, vectors, or compositions in the manufacture of a medicament for use in generating an immune response in a subject.

[0138] In some embodiments, the present disclosure provides a method of treating or preventing tuberculosis in a subject, comprising administering to the subject a fusion protein, nucleic acid, vector, or composition described herein. In some embodiments, a fusion protein, nucleic acid, vector, or composition described herein is used in the manufacture of a medicament for use in treating or preventing tuberculosis in a subject. In some embodiments, the tuberculosis is a latent tuberculosis infection. In some embodiments, the present disclosure provides a method of preventing tuberculosis disease in a subject. In further embodiments, the subject has had a positive result from an interferon-y release assay. In some embodiments, the present disclosure provides a method of preventing Mycobacterium tuberculosis infection. In further embodiments, the subject has had a negative result from an interferon-γ release assay.

[0139] In some embodiments, the present disclosure provides a method of preventing recurrence of tuberculosis and/or M. tuberculosis infection in a subject. In further embodiments, the prevention of recurrence occurs after a previous treatment for tuberculosis.

[0140] In some embodiments, the fusion proteins and vectors (such as recombinant CMV vectors) disclosed herein are administered previously to, concurrently with, or subsequently to a second tuberculosis treatment. In some embodiments, the fusion proteins and vectors disclosed herein are adjunct to the second treatment. In some embodiments, the subject receiving adjunct treatment is infected with drug-resistant M. tuberculosis.

[0141] In some embodiments, the present disclosure provides a method of preventing pulmonary tuberculosis in a subject.

[0142] In some of the aforementioned methods, uses, or compositions for use, the vector is a CMV vector and the CMV vector is administered in an amount effective to elicit a CD4+ T cell response to a Mtb antigen. In some embodiments, at least 10% of the CD4+ T cells elicited by the recombinant HCMV vector are restricted by MHC-II or an ortholog thereof. In some further embodiments, at least 20%, at least 30%, at least 40%, at least 50%, at least 60%, at least 75%, at least 80%, at least 85%, at least 90%, or at least 95% of the CD4+ T cells elicited by the recombinant HCMV vector are restricted by MHC-II or an ortholog thereof.

[0143] In some of the aforementioned methods, uses, or compositions for use, the vector is a CMV vector and the CMV vector is administered in an amount effective to elicit a CD8+ T cell response to a Mtb antigen. In some embodiments, at least 10% of the CD8+ T cells elicited by the CMV vector are restricted by MHC-Ia or an ortholog thereof. In some further embodiments, at least 20%, at least 30%, at least 40%, at least 50%, at least 60%, at least 75%, at least 80%, at least 85%, at least 90%, or at least 95% of the CD8+ T cells elicited by the CMV vector are restricted by MHC-Ia or an ortholog thereof.

[0144] In some further aspects, the present disclosure provides a method of generating CD4+ T cells that recognize MHC-II/peptide complexes by administering a CMV vector encoding a fusion protein described herein. In some embodiments, the method comprises:
[0145] (a) administering to a first subject a CMV vector described herein in an amount effective to generate a set of CD4+ T cells that recognize MHC-II/peptide complexes;
[0146] (b) identifying a first CD4+ TCR from the set of CD4+ T cells, wherein the first CD4+ TCR recognizes a MHC-II/fusion protein-derived peptide complex;
[0147] (c) isolating one or more CD4+ T cells from a second subject; and
[0148] (d) transfecting the one or more CD4+ T cells isolated from the second subject with an expression vector, wherein the expression vector comprises a nucleic acid sequence encoding a second CD4+ TCR and a promoter operably linked to the nucleic acid sequence encoding the second CD4+ TCR, wherein the second CD4+ TCR comprises CDR3α and CDR3β of the first CD4+ TCR, thereby generating one or more CD4+ T cells that recognize MHC-II/peptide complexes.

[0149] In some embodiments, the method comprises:
[0150] (a) identifying a first CD4+ TCR from a set of CD4+ T cells, wherein the set of CD4+ T cells are isolated from a subject that has been administered a CMV vector described herein, and wherein the first CD4+ TCR recognizes a MHC-II/fusion protein-derived peptide complex;
[0151] (b) isolating one or more CD4+ T cells from a second subject; and
[0152] (c) transfecting the one or more CD4+ T cells isolated from the second subject with an expression vector, wherein the expression vector comprises a nucleic acid sequence encoding a second CD4+ TCR and a promoter operably linked to the nucleic acid sequence encoding the second CD4+ TCR, wherein the second CD4+ TCR comprises CDR3α and CDR3β of the first CD4+ TCR, thereby generating one or more TCR-transgenic CD4+ T cells that recognize MHC-II/peptide complexes.

[0153] In some further aspects, the present disclosure provides a method of generating CD8+ T cells that recognize MHC-Ia/peptide complexes by administering a CMV vector encoding a fusion protein described herein. In some embodiments, the method comprises:
[0154] (a) administering to a first subject a CMV vector disclosed herein in an amount effective to generate a set of CD8+ T cells that recognize MHC-Ia/peptide complexes;
[0155] (b) identifying a first CD8+ TCR from the set of CD8+ T cells, wherein the first CD8+ TCR recognizes a MHC-Ia/fusion protein-derived peptide complex;
[0156] (c) isolating one or more CD8+ T cells from a second subject; and
[0157] (d) transfecting the one or more CD8+ T cells isolated from the second subject with an expression vector, wherein the expression vector comprises a nucleic acid sequence encoding a second CD8+ TCR and a promoter operably linked to the nucleic acid sequence encoding the second CD8+ TCR, wherein the second CD8+ TCR comprises CDR3α and CDR3β of the first CD8+ TCR, thereby generating one or more CD8+ T cells that recognize MHC-Ia/peptide complexes.

[0158] In some embodiments, the method comprises:
[0159] (a) identifying a first CD8+ TCR from a set of CD8+ T cells, wherein the set of CD8+ T cells are isolated from a subject that has been administered a CMV vector disclosed herein, and wherein the first CD8+ TCR recognizes a MHC-Ia/fusion protein-derived peptide complex;
[0160] (b) isolating one or more CD8+ T cells from a second subject; and
[0161] (c) transfecting the one or more CD8+ T cells isolated from the second subject with an expression vector, wherein the expression vector comprises a nucleic acid sequence encoding a second CD8+ TCR and a promoter operably linked to the nucleic acid sequence encoding the second CD8+ TCR, wherein the second CD8+ TCR comprises CDR3α and CDR3β of the first CD8+ TCR, thereby generating one or more TCR-transgenic CD8+ T cells that recognize MHC-Ia/peptide complexes.

[0162] In some embodiments of the methods of generating T cells, wherein the first CD4+ TCR or the first CD8+ TCR is identified by DNA or RNA sequencing. In some embodiments, wherein the nucleic acid sequence encoding the second CD4+ TCR or the nucleic acid sequence encoding the second CD4+ TCR is identical to the nucleic acid sequence encoding the first CD4+ TCR or the first CD8+ TCR. In some embodiments, the first and second subjects are human.

[0163] The present disclosure also provides a CD4+ T cell or CD8+ T cell generated by the aforementioned methods. In some further embodiments, the CD4+ or CD8+ T cell is used in a method of treating or preventing a disease in a subject. The CD4+ or CD8+ T cell may be used in still further embodiments in the manufacture of a medicament for use in treating or preventing a disease in a subject.

### VI. Example Embodiments

[0164] In some embodiments, the present disclosure provides:

[0165] 1. A fusion protein comprising or consisting of:
[0166] (a) Ag85A, ESAT-6, Rv3407, Rv2626c, Ra12, TbH9, Ra35, and RpfD, or fragments thereof;
[0167] (b) Ag85A-ESAT-6-Rv3407-Rv2626c-Ra12-TbH9-Ra35-RpfD;
[0168] (c) an amino acid sequence having 90%, 91%, 92%, 93%, 94%, 95%, 96%, 97%, 98%, 99%, or 100% identity to the amino acid sequence according to SEQ ID NO:42;
[0169] (d) the amino acid sequence according to SEQ ID NO:42;
[0170] (e) Ag85A, ESAT-6, Rv3407, Rv2626c, RpfA, RpfD, Ra12, TbH9, and Ra35, or fragments thereof;
[0171] (f) Ag85A-ESAT-6-Rv3407-Rv2626c-RpfA-RpfD-Ra12-TbH9-Ra35;
[0172] (g) (i) an amino acid sequence having 90%, 91%, 92%, 93%, 94%, 95%, 96%, 97%, 98%, 99%, or 100% identity to the amino acid sequence according to any one of SEQ ID NOs:9-10; and (ii) an amino acid sequence having 90%, 91%, 92%, 93%, 94%, 95%, 96%, 97%, 98%, 99%, or 100% identity to the amino acid sequence according to any one of SEQ ID NOs:18-22;
[0173] (h) (i) an amino acid sequence having 90%, 91%, 92%, 93%, 94%, 95%, 96%, 97%, 98%, 99%, or 100% identity to the amino acid sequence according to SEQ ID NO:10; and (ii) an amino acid sequence having 90%, 91%, 92%, 93%, 94%, 95%, 96%, 97%, 98%, 99%, or 100% identity to the amino acid sequence according to SEQ ID NO:19;
[0174] (i) (i) an amino acid sequence having 90%, 91%, 92%, 93%, 94%, 95%, 96%, 97%, 98%, 99%, or 100% identity to the amino acid sequence according to SEQ ID NO:10; and (ii) an amino acid sequence having 90%, 91%, 92%, 93%, 94%, 95%, 96%, 97%, 98%, 99%, or 100% identity to the amino acid sequence according to SEQ ID NO:22;
[0175] (j) (i) the amino acid sequence according to SEQ ID NO:10; and (ii) the amino acid sequence according to SEQ ID NO:19;
[0176] (k) (i) the amino acid sequence according to SEQ ID NO:10; and (ii) the amino acid sequence according to SEQ ID NO:22;
[0177] (l) an amino acid sequence having 90%, 91%, 92%, 93%, 94%, 95%, 96%, 97%, 98%, 99%, or 100% identity to the amino acid sequence according to SEQ ID NO:27;
[0178] (m) an amino acid sequence having 90%, 91%, 92%, 93%, 94%, 95%, 96%, 97%, 98%, 99%, or 100% identity to the amino acid sequence according to SEQ ID NO:28;
[0179] (n) an amino acid sequence having 90%, 91%, 92%, 93%, 94%, 95%, 96%, 97%, 98%, 99%, or 100% identity to the amino acid sequence according to SEQ ID NO:29;
[0180] (o) an amino acid sequence having 90%, 91%, 92%, 93%, 94%, 95%, 96%, 97%, 98%, 99%, or 100% identity to the amino acid sequence according to SEQ ID NO:30;
[0181] (p) the amino acid sequence according to SEQ ID NO:27;
[0182] (q) the amino acid sequence according to SEQ ID NO:28;
[0183] (r) the amino acid sequence according to SEQ ID NO:29;
[0184] (s) the amino acid sequence according to SEQ ID NO:30;
[0185] (t) Ag85A, ESAT-6, Rv3407, Rv2626c, RpfA, RpfD, and TbH9, or fragments thereof;
[0186] (u) Ag85A-ESAT-6-Rv3407-Rv2626c-RpfA-RpfD-TbH9;
[0187] (v) (i) an amino acid sequence having 90%, 91%, 92%, 93%, 94%, 95%, 96%, 97%, 98%, 99%, or 100% identity to the amino acid sequence according to any one of SEQ ID NOs:9-10; and (ii) an amino acid sequence having 90%, 91%, 92%, 93%, 94%, 95%, 96%, 97%, 98%, 99%, or 100% identity to the amino acid sequence according to SEQ ID NO:24;
[0188] (w) (i) an amino acid sequence having 90%, 91%, 92%, 93%, 94%, 95%, 96%, 97%, 98%, 99%, or 100% identity to the amino acid sequence according to SEQ ID NO:10; and (ii) an amino acid sequence having 90%, 91%, 92%, 93%, 94%, 95%, 96%, 97%, 98%, 99%, or 100% identity to the amino acid sequence according to SEQ ID NO:24;
[0189] (x) (i) the amino acid sequence according to SEQ ID NO:10; and (ii) the amino acid sequence according to SEQ ID NO:24;
[0190] (y) an amino acid sequence having 90%, 91%, 92%, 93%, 94%, 95%, 96%, 97%, 98%, 99%, or 100% identity to the amino acid sequence according to SEQ ID NO:31;
[0191] (z) an amino acid sequence having 90%, 91%, 92%, 93%, 94%, 95%, 96%, 97%, 98%, 99%, or 100% identity to the amino acid sequence according to SEQ ID NO:32;
[0192] (aa) the amino acid sequence according to SEQ ID NO:31;
[0193] (bb) the amino acid sequence according to SEQ ID NO:32;
[0194] (cc) Ag85A, ESAT-6, Rv3407, Rv2626c, RpfD, Ra12, TbH9, and Ra35, or fragments thereof;
[0195] (dd) Ag85A-ESAT-6-Rv3407-Rv2626c-RpfD-Ra12-TbH9-Ra35;
[0196] (ee) (i) an amino acid sequence having 90%, 91%, 92%, 93%, 94%, 95%, 96%, 97%, 98%, 99%, or 100% identity to the amino acid sequence according to any one of SEQ ID NOs:1 and 11-12; (ii) an amino acid sequence having 90%, 91%, 92%, 93%, 94%, 95%, 96%, 97%, 98%, 99%, or 100% identity to the amino acid sequence according to SEQ ID NO:2 or 13; (iii) an amino acid sequence having 90%, 91%, 92%, 93%, 94%, 95%, 96%, 97%, 98%, 99%, or 100% identity to the amino acid sequence according to SEQ ID NO:3 or 14; (iv) an amino acid sequence having 90%, 91%, 92%, 93%, 94%, 95%, 96%, 97%, 98%, 99%, or 100% identity to the amino acid sequence according to SEQ ID NO:4 or 15; (v) an amino acid sequence having 90%, 91%, 92%, 93%, 94%, 95%, 96%, 97%, 98%, 99%, or 100% identity to the amino acid sequence according to SEQ ID NO:6 or 17; (vi) an amino acid sequence having 90%, 91%, 92%, 93%, 94%, 95%, 96%, 97%, 98%, 99%, or 100% identity to the amino acid sequence according to SEQ ID NO:23; (vii) an amino acid sequence having 90%, 91%, 92%, 93%, 94%, 95%, 96%, 97%, 98%, 99%, or 100% identity to the amino acid sequence according to SEQ ID NO:8 or 24; and (viii) an amino acid sequence having 90%, 91%, 92%, 93%, 94%, 95%, 96%, 97%, 98%, 99%, or 100% identity to the amino acid sequence according to any one of SEQ ID NOs:25-26;
[0197] (ff) an amino acid sequence having 90%, 91%, 92%, 93%, 94%, 95%, 96%, 97%, 98%, 99%, or 100% identity to the amino acid sequence according to SEQ ID NO:33;
[0198] (gg) an amino acid sequence having 90%, 91%, 92%, 93%, 94%, 95%, 96%, 97%, 98%, 99%, or 100% identity to the amino acid sequence according to SEQ ID NO:34;
[0199] (hh) an amino acid sequence having 90%, 91%, 92%, 93%, 94%, 95%, 96%, 97%, 98%, 99%, or 100% identity to the amino acid sequence according to SEQ ID NO:35;
[0200] (ii) an amino acid sequence having 90%, 91%, 92%, 93%, 94%, 95%, 96%, 97%, 98%, 99%, or 100% identity to the amino acid sequence according to SEQ ID NO:36;
[0201] (jj) the amino acid sequence according to SEQ ID NO:33;
[0202] (kk) the amino acid sequence according to SEQ ID NO:34;
[0203] (ll) the amino acid sequence according to SEQ ID NO:35;
[0204] (mm) the amino acid sequence according to SEQ ID NO:36;
[0205] (nn) Ag85A, ESAT-6, Rv3407, Rv2626c, RpfD, and TbH9, or fragments thereof;
[0206] (oo) Ag85A-ESAT-6-Rv3407-Rv2626c-RpfD-TbH9;
[0207] (pp) (i) an amino acid sequence having 90%, 91%, 92%, 93%, 94%, 95%, 96%, 97%, 98%, 99%, or 100% identity to the amino acid sequence according to any one of SEQ ID NOs:1 and 11-12; (ii) an amino acid sequence having 90%, 91%, 92%, 93%, 94%, 95%, 96%, 97%, 98%, 99%, or 100% identity to the amino acid sequence according to SEQ ID NO:2 or 13; (iii) an amino acid sequence having 90%, 91%, 92%, 93%, 94%, 95%, 96%, 97%, 98%, 99%, or 100% identity to the amino acid sequence according to SEQ ID NO:3 or 14; (iv) an amino acid sequence having 90%, 91%, 92%, 93%, 94%, 95%, 96%, 97%, 98%, 99%, or 100% identity to the amino acid sequence according to SEQ ID NO:4 or 15; (v) an amino acid sequence having 90%, 91%, 92%, 93%, 94%, 95%, 96%, 97%, 98%, 99%, or 100% identity to the amino acid sequence according to SEQ ID NO:6 or 17; and (vi) an amino acid sequence having 90%, 91%, 92%, 93%, 94%, 95%, 96%, 97%, 98%, 99%, or 100% identity to the amino acid sequence according to SEQ ID NO:8 or 24;
[0208] (qq) an amino acid sequence having 90%, 91%, 92%, 93%, 94%, 95%, 96%, 97%, 98%, 99%, or 100% identity to the amino acid sequence according to SEQ ID NO:37;
[0209] (rr) an amino acid sequence having 90%, 91%, 92%, 93%, 94%, 95%, 96%, 97%, 98%, 99%, or 100% identity to the amino acid sequence according to SEQ ID NO:38;
[0210] (ss) the amino acid sequence according to SEQ ID NO:37; or
[0211] (tt) the amino acid sequence according to SEQ ID NO:38.

[0212] 2. A fusion protein encoded by a nucleic acid comprising a sequence having 90%, 91%, 92%, 93%, 94%, 95%, 96%, 97%, 98%, 99%, or 100% identity to the nucleic acid sequence according to SEQ ID NO:41.

[0213] 3. A fusion protein encoded by a nucleic acid comprising the nucleic acid sequence according to SEQ ID NO:41.

[0214] 4. The fusion protein of any one of embodiments 1-3, further comprising a poly-His tag.

[0215] 5. The fusion protein of embodiment 4, wherein the poly-His tag comprises or consists of two to six His residues.

[0216] 6. The fusion protein of any one of embodiments 1-5, wherein the poly-His tag is located at the N-terminus of the fusion protein.

[0217] 7. The fusion protein of embodiment 6, wherein the poly-His tag is inserted after the initial Met residue.

[0218] 8. The fusion protein of any of embodiments 1-7, further comprising a HA tag.

[0219] 9. The fusion protein of embodiment 8, wherein the HA tag is located at the C-terminus of the fusion protein.

[0220] 10. The fusion protein of any one of embodiments 1-9, wherein the fusion protein further comprises one or more linkers connecting one or more of Ag85A, ESAT-6, Rv3407, Rv2626c, RpfA, RpfD, Ra12, TbH9, and Ra35, wherein each of the one or more linkers comprises or consists of one or more amino acid residues.

[0221] 11. A nucleic acid molecule encoding the fusion protein according to any one of embodiments 1-10.

[0222] 12. A vector comprising the nucleic acid molecule of embodiment 11.

[0223] 13. The vector of embodiment 12, further comprising a promoter, wherein a promoter is operably linked to the nucleic acid molecule encoding the fusion protein.

[0224] 14. The vector of embodiment 12 or embodiment 13, wherein the vector is a viral vector.

[0225] 15. The vector of embodiment 14, wherein the viral vector is a cytomegalovirus (CMV) vector.

[0226] 16. A vector comprising a nucleic acid sequence having at least 90%, 91%, 92%, 93%, 94%, 95%, 96%, 97%, 98%, 99%, or 100% identity to the nucleic acid sequence according to SEQ ID NO:44.

[0227] 17. A vector comprising the nucleic acid sequence according to SEQ ID NO:44.

[0228] 18. A vector consisting essentially of the nucleic acid sequence according to SEQ ID NO:44.

[0229] 19. A vector consisting of the nucleic acid sequence according to SEQ ID NO:44.

[0230] 20. The vector of any one of embodiments 15-19, wherein the viral vector is a RhCMV vector, a HCMV vector, or a recombinant HCMV vector.

[0231] 21. The vector of any one of embodiments 15-20, wherein the promoter is operably linked to the nucleic acid molecule encoding the fusion protein and the promoter is a UL78 promoter, or an ortholog thereof.

[0232] 22. The vector of embodiment 21, wherein the nucleic acid molecule encoding the fusion protein replaces all or part of UL78.

[0233] 23. The vector of embodiment 22, wherein the vector comprises a nucleic acid sequence having at least 90%, 91%, 92%, 93%, 94%, 95%, 96%, 97%, 98%, 99%, or 100% identity to the nucleic acid sequence according to SEQ ID NO:44.

[0234] 24. The vector of embodiment 15 or embodiment 20, wherein the promoter is operably linked to the nucleic acid molecule encoding the fusion protein and the promoter is a UL82 promoter, or an ortholog thereof.

[0235] 25. The vector of embodiment 24, wherein the nucleic acid molecule encoding the fusion protein replaces all or part of UL82

[0236] 26. The vector of any one of embodiments 15-25, wherein the RhCMV vector or HCMV vector does not express UL128 or UL130, or orthologs thereof.

[0237] 27. A recombinant HCMV vector comprising a TR3 backbone and a nucleic acid sequence encoding a heterologous antigen according to SEQ ID NO: 42, wherein:
[0238] (a) the vector does not express UL128 or UL130, or orthologs thereof,
[0239] (b) the vector comprises a nucleic acid sequence encoding UL146, UL147, UL18, and UL82 or orthologs thereof, and
[0240] (c) the heterologous antigen replaces all or part of UL78 and is operably linked to the UL78 promoter.

[0241] 28. The recombinant HCMV vector of embodiment 27, wherein the recombinant HCMV vector comprises a nucleic acid sequence having at least 90%, 91%, 92%, 93%, 94%, 95%, 96%, 97%, 98%, 99%, or 100% identity to the nucleic acid sequence according to SEQ ID NO:44.

[0242] 29. The vector of any one of embodiments 15-28, wherein the RhCMV or HCMV vector (i) comprises a nucleic acid sequence encoding UL146 and a nucleic acid sequence encoding UL147, or orthologs thereof, and (ii) does not express UL128 or UL130, or orthologs thereof.

[0243] 30. The vector of any one of embodiments 26-29, wherein the vector does not express a UL128 protein or a UL130 protein, resulting from the presence of one or more mutations in the nucleic acid sequences encoding UL128 and UL130.

[0244] 31. The vector of embodiment 30, wherein the mutation in the nucleic acid sequences encoding UL128 and UL130 is a point mutation, frameshift mutation, truncation mutation, or deletion of all of the nucleic acid sequences encoding the viral protein.

[0245] 32. The vector of any one of embodiments 15-31, wherein the vector is a HCMV vector comprising a TR3 backbone.

[0246] 33. The vector of any one of embodiments 15-32, wherein the vector further comprises a nucleic acid sequence encoding a microRNA (miRNA) recognition element (MRE), wherein the MRE contains a target site for a miRNA expressed in endothelial cells.

[0247] 34. The vector of any one of embodiments 15-33, wherein the vector further comprises a nucleic acid sequence encoding a MRE, wherein the MRE contains a target site for a miRNA expressed in myeloid cells.

[0248] 35. A pharmaceutical composition comprising (i) (a) the fusion protein of any one of embodiments 1-10, (b) the nucleic acid of embodiment 11, or (c) the vector of any one of embodiments 12-34; and (ii) a pharmaceutically acceptable carrier.

[0249] 36. The pharmaceutical composition of embodiment 35, wherein the pharmaceutically acceptable carrier is a histidine trehalose (HT) buffer.

[0250] 37. The pharmaceutical composition of embodiment 35 or 36, wherein the pharmaceutically acceptable carrier is a histidine trehalose (HT) buffer comprising about 20 mM L-histidine and about 10% (w/v) trehalose.

[0251] 38. The pharmaceutical composition of any one of embodiments 35-37, wherein the pharmaceutically acceptable carrier is a histidine trehalose (HT) buffer comprising 20 mM L-histidine and 10% (w/v) trehalose.

[0252] 39. The pharmaceutical composition of any one of embodiments 35-38, wherein the pharmaceutically acceptable carrier is a histidine trehalose (HT) buffer having a pH of 7.2 comprising 20 mM L-histidine and 10% (w/v) trehalose.

[0253] 40. An immunogenic composition comprising (i) (a) the fusion protein of any one of embodiments 1-10, (b) the nucleic acid of embodiment 11, or (c) the vector of any one of embodiments 12-34; and (ii) a pharmaceutically acceptable carrier.

[0254] 41. A method of generating an immune response in a subject, comprising administering to the subject the fusion protein, nucleic acid, vector, or composition of any one of embodiments 1-40.

[0255] 42. Use of the fusion protein, nucleic acid, vector, or composition of any one of embodiments 1-40 in the manufacture of a medicament for use in generating an immune response in a subject.

[0256] 43. The fusion protein, nucleic acid, vector, or composition of any one of embodiments 1-40 for use in generating an immune response in a subject.

[0257] 44. A method of treating or preventing tuberculosis in a subject, comprising administering to the subject the fusion protein, nucleic acid, vector, or composition of any one of embodiments 1-40.

[0258] 45. Use of the fusion protein, nucleic acid, vector, or composition of any one of embodiments 1-40 in the manufacture of a medicament for use in treating or preventing tuberculosis in a subject.

[0259] 46. The fusion protein, nucleic acid, vector, or composition of any one of embodiments 1-40 for use in treating or preventing tuberculosis in a subject.

[0260] 47. The fusion protein, nucleic acid, vector, or composition of any one of embodiments 1-40 for use in treating or preventing tuberculosis in a subject, wherein the subject is CMV positive.

[0261] 48. The fusion protein, nucleic acid, vector, or composition of any one of embodiments 1-40 for use in treating or preventing tuberculosis in a subject, wherein the subject is CMV negative.

[0262] 49. The fusion protein, nucleic acid, vector, or composition of any one of embodiments 1-40, 47, or 48 for use in treating or preventing tuberculosis in a subject, wherein the subject tests positive in an interferon-y release assay.

[0263] 50. The fusion protein, nucleic acid, vector, or composition of any one of embodiments 1-40, 47, or 48 for use in treating or preventing tuberculosis in a subject, wherein the subject tests negative in an interferon-y release assay.

[0264] 51. The fusion protein, nucleic acid, vector, or composition of any one of embodiments 1-40 or 47-50 for use in treating or preventing tuberculosis in a subject, wherein the subject has previously been administered bacille Calmette-Guerin vaccine (BCG).

[0265] 52. The fusion protein, nucleic acid, vector, or composition of any one of embodiments 1-40 or 47-51 for use in treating or preventing tuberculosis in a subject, wherein the subject is HIV positive.

[0266] 53. The fusion protein, nucleic acid, vector, or composition of any one of embodiments 1-40 or 47-52 for use in treating or preventing tuberculosis in a subject, wherein the subject is HIV positive and is currently taking anti-retroviral therapeutics.

[0267] 54. The fusion protein, nucleic acid, vector, or composition of any one of embodiments 1-40 or 47-53 for use in treating or preventing tuberculosis in a subject, wherein the subject is administered a second therapy.

[0268] 55. The method, use in manufacture, or use of any one of embodiments 44-54, wherein the tuberculosis is a latent tuberculosis infection.

[0269] 56. The method, use in manufacture, or use of any one of embodiments 44-55, wherein the tuberculosis is a pulmonary tuberculosis infection.

[0270] 57. The method, use in manufacture, or use of any one of embodiments 44-56, wherein the tuberculosis is a recurrent tuberculosis infection.

[0271] 58. The method, use in manufacture, or use of any one of embodiments 41-57, wherein the vector is a CMV vector and the CMV vector is administered in an amount effective to elicit a CD4+ T cell response to a Mtb antigen.

[0272] 59. The method, use in manufacture, or use of any one of embodiments 41-58, wherein the vector is a CMV vector and the CMV vector is administered in an amount of about 10² pfu to about 10⁷ pfu.

[0273] 60. The method, use in manufacture, or use of embodiment 58 or embodiment 59, wherein at least 10% of the CD4+ T cells elicited by the recombinant HCMV vector are restricted by MHC-II or an ortholog thereof.

[0274] 61. The method, use in manufacture, or use of embodiment 60, wherein at least 20%, at least 30%, at least 40%, at least 50%, at least 60%, at least 75%, at least 80%, at least 85%, at least 90%, or at least 95% of the CD4+ T cells elicited by the recombinant HCMV vector are restricted by MHC-II or an ortholog thereof.

[0275] 62. The method, use in manufacture, or use of any one of embodiments 41-61, wherein the vector is a CMV vector and the CMV vector is administered in an amount effective to elicit a CD8+ T cell response to a Mtb antigen.

[0276] 63. The method, use in manufacture, or vector or composition for use of embodiment 62, wherein at least 10% of the CD8+ T cells elicited by the CMV vector are restricted by MHC-Ia or an ortholog thereof.

[0277] 64. The method, use in manufacture, or vector or composition for use of embodiment 63, wherein at least 20%, at least 30%, at least 40%, at least 50%, at least 60%, at least 75%, at least 80%, at least 85%, at least 90%, or at least 95% of the CD8+ T cells elicited by the CMV vector are restricted by MHC-Ia or an ortholog thereof.

[0278] 65. A method of generating CD4+ T cells that recognize MHC-II/peptide complexes, the method comprising:
[0279] (a) administering to a first subject the CMV vector of any one of embodiments 15-34 in an amount effective to generate a set of CD4+ T cells that recognize MHC-II/peptide complexes;
[0280] (b) identifying a first CD4+ TCR from the set of CD4+ T cells, wherein the first CD4+ TCR recognizes a MHC-II/fusion protein-derived peptide complex;
[0281] (c) isolating one or more CD4+ T cells from a second subject; and
[0282] (d) transfecting the one or more CD4+ T cells isolated from the second subject with an expression vector, wherein the expression vector comprises a nucleic acid sequence encoding a second CD4+ TCR and a promoter operably linked to the nucleic acid sequence encoding the second CD4+ TCR, wherein the second CD4+ TCR comprises CDR3α and CDR3β of the first CD4+ TCR, thereby generating one or more CD4+ T cells that recognize MHC-II/peptide complexes.

[0283] 66. A method of generating CD4+ T cells that recognize MHC-II/peptide complexes, the method comprising:
[0284] (a) identifying a first CD4+ TCR from a set of CD4+ T cells, wherein the set of CD4+ T cells are isolated from a subject that has been administered the CMV vector of any one of embodiments 15-34, and wherein the first CD4+ TCR recognizes a MHC-II/fusion protein-derived peptide complex;
[0285] (b) isolating one or more CD4+ T cells from a second subject; and
[0286] (c) transfecting the one or more CD4+ T cells isolated from the second subject with an expression vector, wherein the expression vector comprises a nucleic acid sequence encoding a second CD4+ TCR and a promoter operably linked to the nucleic acid sequence encoding the second CD4+ TCR, wherein the second CD4+ TCR comprises CDR3α and CDR3β of the first CD4+ TCR, thereby generating one or more TCR-transgenic CD4+ T cells that recognize MHC-II/peptide complexes.

[0287] 67. A method of generating CD8+ T cells that recognize MHC-Ia/peptide complexes, the method comprising:
[0288] (a) administering to a first subject the CMV vector of any one of embodiments 15-34 in an amount effective to generate a set of CD8+ T cells that recognize MHC-Ia/peptide complexes;
[0289] (b) identifying a first CD8+ TCR from the set of CD8+ T cells, wherein the first CD8+ TCR recognizes a MHC-Ia/fusion protein-derived peptide complex;
[0290] (c) isolating one or more CD8+ T cells from a second subject; and
[0291] (d) transfecting the one or more CD8+ T cells isolated from the second subject with an expression vector, wherein the expression vector comprises a nucleic acid sequence encoding a second CD8+ TCR and a promoter operably linked to the nucleic acid sequence encoding the second CD8+ TCR, wherein the second CD8+ TCR comprises CDR3α and CDR3β of the first CD8+ TCR, thereby generating one or more CD8+ T cells that recognize MHC-Ia/peptide complexes.

[0292] 68. A method of generating CD8+ T cells that recognize MHC-Ia/peptide complexes, the method comprising:
[0293] (a) identifying a first CD8+ TCR from a set of CD8+ T cells, wherein the set of CD8+ T cells are isolated from a subject that has been administered the CMV vector of any one of embodiments 15-34, and wherein the first CD8+ TCR recognizes a MHC-Ia/fusion protein-derived peptide complex;
[0294] (b) isolating one or more CD8+ T cells from a second subject; and
[0295] (c) transfecting the one or more CD8+ T cells isolated from the second subject with an expression vector, wherein the expression vector comprises a nucleic acid sequence encoding a second CD8+ TCR and a promoter operably linked to the nucleic acid sequence encoding the second CD8+ TCR, wherein the second CD8+ TCR comprises CDR3α and CDR3β of the first CD8+ TCR, thereby generating one or more TCR-transgenic CD8+ T cells that recognize MHC-Ia/peptide complexes.

[0296] 69. The method of any one of embodiments 65-68, wherein the first CD4+ TCR or the first CD8+ TCR is identified by DNA or RNA sequencing.

[0297] 70. The method of any one of embodiments 65-69, wherein the nucleic acid sequence encoding the second CD4+ TCR or the nucleic acid sequence encoding the second CD4+ TCR is identical to the nucleic acid sequence encoding the first CD4+ TCR or the first CD8+ TCR.

[0298] 71. The method of any one of embodiments 65-70, wherein the first subject is a human.

[0299] 72. The method of any one of embodiments 65-71, wherein the second subject is a human.

[0300] 73. A CD4+ T cell generated by the method of any one of embodiments 65, 66, and 69-72.

[0301] 74. A method of treating or preventing a disease in a subject, the method comprising administering the CD4+ T cell of embodiment 73 to the subject.

[0302] 75. Use of the CD4+ T cell of embodiment 73 in the manufacture of a medicament for use in treating or preventing a disease in a subject.

[0303] 76. The CD4+ T cell of embodiment 73 for use in treating or preventing a disease in a subject.

[0304] 77. A CD8+ T cell generated by the method of any one of embodiments 67-72.

[0305] 78. A method of treating or preventing a disease in a subject, the method comprising administering the CD8+ T cell of embodiment 77 to the subject.

[0306] 79. Use of the CD8+ T cell of embodiment 77 in the manufacture of a medicament for use in treating or preventing a disease in a subject.

[0307] 80. The CD8+ T cell of embodiment 77 for use in treating or preventing a disease in a subject.

### EXAMPLES

### Example 1: Construction of Mtb Antigen Cassettes

[0308] A human CMV vector encoding a fusion protein comprising Mycobacterium tuberculosis (Mtb) antigens was designed. Three Mtb antigen cassettes were evaluated, including Fusion 6, Fusion 7 (Fusion 6 with deletion of RpfA and insertion of a variant of the fusion protein M72, “M72-fusion-2”, at the RpfA site), and Fusion 8 (Fusion 6 plus addition of M72-fusion-2 at the C-terminal) (FIG. 2). The variant of M72, “M72-fusion-2”, included in Fusion 7 and Fusion 8 is M72 wherein the N-terminal two-residue histidine tag and the methionine at amino acid position 1 have both been removed (SEQ ID NO.: 22). A table summarizing conservation of Mtb antigens and RpfA variants is shown in FIG. 3.

Components of Fusion 6 Fusion 6 is a Mtb fusion protein comprising Ag85A, ESAT6, Rv3407, Rv2626c, RpfA, and RpfD.

### Design of Fusion 7

[0309] Fusion 7 was constructed based on Fusion 6. To create Fusion 7, RpfA was first deleted. RpfA has variable expression in Mtb strains (FIG. 4). For example, RpfA in many Mtb strains contains only the C-terminus (starting at 321 bp in RpfA) of the isoform of Fusion 6. Additionally, a subset of Mtb strains have only the RpfA N-terminus and others lack both the N-terminus and the middle portion. Mtb isolates with the shortest RpfA (C-terminus only; <100 amino acids) are predominantly from the UK and the Netherlands. Mtb isolates from South Africa have variable RpfAs and may include the C-terminus only, the N-terminus only, or full length RpfA (FIG. 5). Next, M72-fusion-2 was inserted into the RpfA site. M72-fusion-2 is derived from, M72, a fusion protein derived from two M. tuberculosis antigens, Mtb32a and TbH9, that functions as a vaccine antigen. Mtb32a is a serine protease conserved in virulent and avirulent Mtb strains. TbH9 (also known as Mtb39a) is a PPE/PE family protein encoded by Rv1196/ppe18. PPE/PE proteins are known to be prominent targets of Mtb immunity. TbH9 is among antigens identified by TCR profiling of “controllers” versus “progressors” in Mtb. RpfA was deleted to accommodate expression of the M72 antigens while maintaining a genetically stable vector. TbH9 is a CD4 and CD8 T cell target in latency. The final Fusion 7 construct (SEQ ID NO: 42) comprises Ag85A, ESAT6-Rv3407-Rv2626c, M72-fusion-2 (Mtb32A and TbH9), and RpfD.

### Design of Fusion 8

[0310] Fusion 8 was constructed based on Fusion 6, similarly to the construction of Fusion 7 except that M72-fusion-2 was added to the C-terminal end of Fusion 6 and RpfA was not deleted.

### Example 2: Evaluation of Mtb Antigen Cassettes for Antigen Expression, Genetic Stability, and Immunogenicity

[0311] Mtb antigen cassettes were paired with either a UL82 or UL78 promoter. Antigen expression, genetic stability, and immunogenicity (in rhesus macaques) was evaluated.

TABLE 1
Mtb antigen cassette and promoter combinations for evaluation.

| Mtb Antigen Cassette | Promoter |
|---|---|
| Fusion 6 | UL78 promoter |
| Fusion 7 | UL78 promoter |
| Fusion 8 | UL78 promoter |
| Fusion 6 | UL82 promoter |
| Fusion 7 | UL82 promoter |
| Fusion 8 | UL82 promoter |

[0312] Antigen expression for six antigen cassette and promoter combinations (Table 1) was tested in bacterial artificial chromosomes (BACs) by western blot with ESAT-6 antibody. All six BACs had Mtb antigen expression with bands in the expected size range.

[0313] Genetic stability was evaluated using the same BACs. Three clones per construct were passaged to mimic the drug production process (Research Seed Stock with three additional passages (RSS+3), for a total of four passages) with next-generation sequencing (NGS) at each passage. Passages were performed in T-150 flasks at an MOI of 0.003 for UL78-containing constructs or at an MOI of 0.01 for UL82-containing constructs. Genetic stability was defined as observing no significant modifications that increase with passage (i.e., deletions and/or rearrangements involving the transgene or U_{L}/1b′ region). BACs expressing Fusion 6 +UL78 promoter and Fusion 6 +UL82 promoter were found to be stable through RSS+3. The BAC expressing Fusion 8 +UL78 promoter showed insert and vector backbone instability. BACs expressing Fusion 7 +UL78 promoter and Fusion 7 +UL82 promoter were stable through RSS+2 and RSS+3. The BAC expressing Fusion 8 +UL82 promoter was stable through RSS+2 and RSS+3.

[0314] Immunogenicity was evaluated in a rhesus macaque model. Rhesus macaques were administered HCMV viral vectors expressing six antigen cassette and promoter combinations (Table 1) at a dose of 10⁶ pfu. Peripheral blood mononuclear cells (PBMCs) were isolated in two week increments for up to ten weeks, then stimulated with Mtb peptide pools containing peptides from genes expressed in Fusion 6, or Fusion 6 and M72 prior to intracellular cytokine staining (ICS). Frequencies of CD4+ and CD8+ T cells, frequencies of IFNγ+ and/or TNFα+ cells, and memory/effector T cell phenotypes were determined. In animals administered viral vectors expressing Fusion 6 +UL78 promoter or Fusion 6 +UL82 promoter, CD4+ and CD8+ T cell responses to Fusion 6 peptides were detected at 6 weeks post-dosing (FIGS. 6A-6L). In animals administered viral vectors expressing Fusion 7 +UL78 promoter, Fusion 7 +UL82 promoter, or Fusion 8 +UL82 promoter, T cell responses to peptide pools were detected at 6 weeks (FIGS. 7A-7N). T cell response was indicated by the detection of IFNγ+ and/or TNFα+CD4+ and/or CD8+ T cells.

[0315] All three Mtb antigen designs were functional. The Fusion 7 antigen cassette elicited CD4+ and CD8+ T cell responses in rhesus macaques. RpfA has variable expression in Mtb strains, justifying replacement with M72-fusion-2, which confers protection against CMV in human studies. The Fusion 6 antigen cassette incorporates a broad range of Mtb antigens incorporated from different stages of the infectious cycle (active/latent/reactivation stages) and has been shown to be protective in rhesus macaque studies. The Fusion 8 antigen cassette includes the Fusion 6 cassette as well M72-fusion-2, but can be associated with genetic instability.

### Example 3: Selection of a hCMV-TB Vector Backbone and TB-Antigen Promoter

### Vector Backbone Selection

[0316] Mtb-specific CD4+ T cells are considered more important for infection control than CD8+ T cells. A non-human primate study of intravenous BCG (Bacillus Calmette-Guerin) vaccination suggests the importance of antigen-specific T cell frequency. Additionally, the GSK M72-ASO1E vaccine elicits antibodies and CD4+ T cells but few or no CD8+ T cells (Penn-Nicholson A. et al., Safety and immunogenicity of candidate vaccine M72/ASO1E in adolescents in a Mtb endemic setting. Vaccine. 2015 Jul. 31; 33(32):4025-34). Thus, eliciting Mtb-specific CD4+ T cells is important for CMV-TB vaccine design and is preferred to eliciting CD8+ T cells at the expense of the CD4+ T cell response. Further, eliciting conventional class I-restricted CD8+ T cells is preferable to eliciting to class II/MHC-E restricted CD8+ T cells as class II/MHC-restriction was shown to not be required for Rh-CMV Mtb protection.

[0317] The CMV vector backbone described here is known to elicit a robust CD4+ T cell response. Additionally, the backbone contains an intact UL146-147, which is expected to induce a Class I restricted CD8+ T cell response. The backbone comprises deletions of UL128-130, which is known to promote genetic stability in MRC-5 fibroblast cells.

[0318] A CMV-TB vector was constructed with features as shown in Table 2.

TABLE 2
Features of CMV-TB vector

| Function | Feature |
|---|---|
| Tropism & Immune | ΔUL128/UL130 |
| programing | UL146/147 intact |
| | UL18 intact |
| | ΔUL78 or ΔUL82 |
| Growth restriction | ΔUL82 or ΔUL78 |
| Antigen delivery | Mtb Antigen |
| | UL82 or UL78 |

### Mtb Antigen Cassette Promoter Selection

[0319] A Mtb fusion protein can be inserted into the CMV vector backbone to replace a gene (e.g., UL82 or UL78) such that the fusion protein is operably linked to and is expressed by the promoter of the deleted gene. The UL78 promoter was found to effectively drive expression of Fusion 7 or Fusion 6 and the UL82 promoter was found to effectively drive expression of Fusion 8. Deletion of the HCMV gene UL82 (which encodes the tegument protein pp71) is known to create a growth deficiency, resulting in lower viral yield. Additionally, expression of exogenous pp71 is also known to increase transgene expression from UL82-deleted CMV vectors (Caposio P. et al., Characterization of a live-attenuated HCMV-based vaccine platform. Sci Rep. 2019 Dec. 17; 9(1):19236). Therefore, use of a UL82 promoter will require exogenous pp71 expression in order to achieve the highest levels of transgene expression and viral yield. In contrast, use of a UL78 promoter eliminates the need for exogenous expression of pp71 mRNA during production.

### Example 4: A Phase 1A/1B Study to Evaluate the Safety, Reactogenicity, Tolerability, and Immunogenicity of Vector 4

[0320] A Phase 1a/1b study has been designed to evaluate the safety, reactogenicity, tolerability, and immunogenicity of Vector 4 (SEQ ID NO:44). Four groups of patients will be evaluated based on CMV status (positive or negative), interferon-7 release assay result (positive or negative), and receipt of prior BCG (bacille Calmette-Guerin) vaccination (positive or negative). “Part A” will include CMV+/IGRA− subjects, “Part B” will include CMV−/IGRA− subjects, “Part C” will include CMV+/IGRA−/BCG+ subjects, and “Part D” will include CMV+/IGRA+/BCG+ subjects. The study will take place across multiple sites in the United States (Part A and Part B groups) and one to two sites in countries where Mtb is endemic (e.g. South Africa). Each cohort will be composed of ten (10) patients, with eight (8) receiving the drug, and two (2) receiving placebo.

### Example 5: A Development Plan to Evaluate Vector 4 for Use in Multiple Tuberculosis-Related Indications

[0321] FIG. 9 shows a development plan to evaluate Vector 4 (SEQ ID NO:44) for use in prevention of pulmonary tuberculosis in adolescents and adults. FIG. 10 shows a development plan to evaluate Vector 4 (SEQ ID NO:44) for use in prevention of M. tuberculosis infection and prevention of tuberculosis relapse in adolescents and adults.

[0322] While specific embodiments have been illustrated and described, it will be readily appreciated that the various embodiments described above can be combined to provide further embodiments, and the various embodiments described above can be combined to provide further embodiments.

[0323] All of the U.S. patents, U.S. patent application publications, U.S. patent applications, foreign patents, foreign patent applications, and non-patent publications referred to in this specification and/or listed in the Application Data Sheet, including U.S. Provisional Application Nos. 63/239,278 filed on Aug. 31, 2021 and 63/392,778 filed on Jul. 27, 2022 are incorporated herein by reference, in their entirety, unless explicitly stated otherwise. Aspects of the embodiments can be modified, if necessary to employ concepts of the various patents, applications, and publications to provide yet further embodiments.

[0324] These and other changes can be made to the embodiments in light of the above-detailed description. In general, in the following claims, the terms used should not be construed to limit the claims to the specific embodiments disclosed in the specification and the claims, but should be construed to include all possible embodiments along with the full scope of equivalents to which such claims are entitled. Accordingly, the claims are not limited by the disclosure.

The application's sequence listing, which the Patent Office published only in electronic form, follows.

SEQUENCE LISTING (44 sequences)

SEQ ID NO: 1 - protein, 338 aa, Mycobacterium tuberculosis
  source 1..338: note = strain ATCC 25618 / H37Rv, UniProtKB - P9WQP3 (A85A_MYCTU)
MQLVDRVRGAVTGMSRRLVVGAVGAALVSGLVGAVGGTATAGAFSRPGLPVEYLQVPSPSMGRDIKVQFQSGGANSPALYLLDGLRAQDDFSGWDINTPAFEWYDQSGLSVVMPVGGQSSFYSDWYQPACGKAGCQTYKWETFLTSELPGWLQANRHVKPTGSAVVGLSMAASSALTLAIYHPQQFVYAGAMSGLLDPSQAMGPTLIGLAMGDAGGYKASDMWGPKEDPAWQRNDPLLNVGKLIANNTRVWVYCGNGKPSDLGGNNLPAKFLEGFVRTSNIKFQDAYNAGGGHNGVFDFPDSGTHSWEYWGAQLNAMKPDLQRALGATPNTGPAPQGA

SEQ ID NO: 2 - protein, 95 aa, Mycobacterium tuberculosis
  source 1..95: note = strain ATCC 25618 / H37Rv, UniProtKB - P9WNK7 (ESXA_MYCTU)
MTEQQWNFAGIEAAASAIQGNVTSIHSLLDEGKQSLTKLAAAWGGSGSEAYQGVQQKWDATATELNNALQNLARTISEAGQAMASTEGNVTGMFA

SEQ ID NO: 3 - protein, 99 aa, Mycobacterium tuberculosis
  source 1..99: note = strain ATCC 25618 / H37Rv, UniProtKB - P9WF23 (VPB47_MYCTU)
MRATVGLVEAIGIRELRQHASRYLARVEAGEELGVTNKGRLVARLIPVQAAERSREALIESGVLIPARRPQNLLDVTAEPARGRKRTLSDVLNEMRDEQ

SEQ ID NO: 4 - protein, 143 aa, Mycobacterium tuberculosis
  source 1..143: note = strain ATCC 25618 / H37Rv, UniProtKB - P9WJA3 (HRP1_MYCTU)
MTTARDIMNAGVTCVGEHETLTAAAQYMREHDIGALPICGDDDRLHGMLTDRDIVIKGLAAGLDPNTATAGELARDSIYYVDANASIQEMLNVMEEHQVRRVPVISEHRLVGIVTEADIARHLPEHAIVQFVKAICSPMALAS

SEQ ID NO: 5 - protein, 407 aa, Mycobacterium tuberculosis
  source 1..407: note = strain ATCC 25618 / H37Rv, UniProtKB - P9WG31 (RPFA_MYCTU)
MSGRHRKPTTSNVSVAKIAFTGAVLGGGGIAMAAQATAATDGEWDQVARCESGGNWSINTGNGYLGGLQFTQSTWAAHGGGEFAPSAQLASREQQIAVGERVLATQGRGAWPVCGRGLSNATPREVLPASAAMDAPLDAAAVNGEPAPLAPPPADPAPPVELAANDLPAPLGEPLPAAPADPAPPADLAPPAPADVAPPVELAVNDLPAPLGEPLPAAPADPAPPADLAPPAPADLAPPAPADLAPPAPADLAPPVELAVNDLPAPLGEPLPAAPAELAPPADLAPASADLAPPAPADLAPPAPAELAPPAPADLAPPAAVNEQTAPGDQPATAPGGPVGLATDLELPEPDPQPADAPPPGDVTEAPAETPQVSNIAYTKKLWQAIRAQDVCGNDALDSLAQPYVIG

SEQ ID NO: 6 - protein, 154 aa, Mycobacterium tuberculosis
  source 1..154: note = strain ATCC 25618 / H37Rv, UniProtKB - P9WG27 (RPFD_MYCTU)
MTPGLLTTAGAGRPRDRCARIVCTVFIETAVVATMFVALLGLSTISSKADDIDWDAIAQCESGGNWAANTGNGLYGGLQISQATWDSNGGVGSPAAASPQQQIEVADNIMKTQGPGAWPKCSSCSQGDAPLGSLTHILTFLAAETGGCSGSRDD

SEQ ID NO: 7 - protein, 355 aa, Mycobacterium tuberculosis
  source 1..355: note = strain ATCC 25618 / H37Rv, UniProtKB - O07175 (O07175_MYCTU)
MSNSRRRSLRWSWLLSVLAAVGLGLATAPAQAAPPALSQDRFADFPALPLDPSAMVAQVGPQVVNINTKLGYNNAVGAGTGIVIDPNGVVLTNNHVIAGATDINAFSVGSGQTYGVDVVGYDRTQDVAVLQLRGAGGLPSAAIGGGVAVGEPVVAMGNSGGQGGTPRAVPGRVVALGQTVQASDSLTGAEETLNGLIQFDAAIQPGDSGGPVVNGLGQVVGMNTAASDNFQLSQGGQGFAIPIGQAMAIAGQIRSGGGSPTVHIGPTAFLGLGVVDNNGNGARVQRVVGSAPAASLGISTGDVITAVDGAPINSATAMADALNGHHPGDVISVTWQTKSGGTRTGNVTLAEGPPA

SEQ ID NO: 8 - protein, 391 aa, Mycobacterium tuberculosis
  source 1..391: note = strain ATCC 25618 / H37Rv, UniProtKB - L7N675 (PPE18_MYCTU)
MVDFGALPPEINSARMYAGPGSASLVAAAQMWDSVASDLFSAASAFQSVVWGLTVGSWIGSSAGLMVAAASPYVAWMSVTAGQAELTAAQVRVAAAAYETAYGLTVPPPVIAENRAELMILIATNLLGQNTPAIAVNEAEYGEMWAQDAAAMFGYAAATATATATLLPFEEAPEMTSAGGLLEQAAAVEEASDTAAANQLMNNVPQALQQLAQPTQGTTPSSKLGGLWKTVSPHRSPISNMVSMANNHMSMTNSGVSMTNTLSSMLKGFAPAAAAQAVQTAAQNGVRAMSSLGSSLGSSGLGGGVAANLGRAASVGSLSVPQAWAAANQAVTPAARALPLTSLTSAAERGPGQMLGGLPVGQMGARAGGGLSGVLRVPPRPYVMPHSPAAG

SEQ ID NO: 9 - protein, 1190 aa, synthetic construct
  source 1..1190: note = Ag85A-ESAT-6-Rv3407-Rv2626c-RpfA-RpfD fusion
MAFSRPGLPVEYLQVPSPSMGRDIKVQFQSGGANSPALYLLDGLRAQDDFSGWDINTPAFEWYDQSGLSVVMPVGGQSSFYSDWYQPACGKAGCQTYKWETFLTSELPGWLQANRHVKPTGSAVVGLSMAASSALTLAIYHPQQFVYAGAMSGLLDPSQAMGPTLIGLAMGDAGGYKASDMWGPKEDPAWQRNDPLLNVGKLIANNTRVWVYCGNGKPSDLGGNNLPAKFLEGFVRTSNIKFQDAYNAGGGHNGVFDFPDSGTHSWEYWGAQLNAMKPDLQRALGATPNTGPAPQGATEQQWNFAGIEAAASAIQGNVTSIHSLLDEGKQSLTKLAAAWGGSGSEAYQGVQQKWDATATELNNALQNLARTISEAGQAMASTEGNVTGMFARATVGLVEAIGIRELRQHASRYLARVEAGEELGVTNKGRLVARLIPVQAAERSREALIESGVLIPARRPQNLLDVTAEPARGRKRTLSDVLNEMRDEQTTARDIMNAGVTCVGEHETLTAAAQYMREHDIGALPICGDDDRLHGMLTDRDIVIKGLAAGLDPNTATAGELARDSIYYVDANASIQEMLNVMEEHQVRRVPVISEHRLVGIVTEADIARHLPEHAIVQFVKAICSPMALASSGRHRKPTTSNVSVAKIAFTGAVLGGGGIAMAAQATAATDGEWDQVARCESGGNWSINTGNGYLGGLQFTQSTWAAHGGGEFAPSAQLASREQQIAVGERVLATQGRGAWPVCGRGLSNATPREVLPASAAMDAPLDAAAVNGEPAPLAPPPADPAPPVELAANDLPAPLGEPLPAAPADPAPPADLAPPAPADVAPPVELAVNDLPAPLGEPLPAAPADPAPPADLAPPAPADLAPPAPADLAPPAPADLAPPVELAVNDLPAPLGEPLPAAPAELAPPADLAPASADLAPPAPADLAPPAPAELAPPAPADLAPPAAVNEQTAPGDQPATAPGGPVGLATDLELPEPDPQPADAPPPGDVTEAPAETPQVSNIAYTKKLWQAIRAQDVCGNDALDSLAQPYVIGTPGLLTTAGAGRPRDRCARIVCTVFIETAVVATMFVALLGLSTISSKADDIDWDAIAQCESGGNWAANTGNGLYGGLQISQATWDSNGGVGSPAAASPQQQIEVADNIMKTQGPGAWPKCSSCSQGDAPLGSLTHILTFLAAETGGCSGSRDD

SEQ ID NO: 10 - protein, 1189 aa, synthetic construct
  source 1..1189: note = Ag85A-ESAT-6-Rv3407-Rv2626c-RpfA-RpfD fusion 2
AFSRPGLPVEYLQVPSPSMGRDIKVQFQSGGANSPALYLLDGLRAQDDFSGWDINTPAFEWYDQSGLSVVMPVGGQSSFYSDWYQPACGKAGCQTYKWETFLTSELPGWLQANRHVKPTGSAVVGLSMAASSALTLAIYHPQQFVYAGAMSGLLDPSQAMGPTLIGLAMGDAGGYKASDMWGPKEDPAWQRNDPLLNVGKLIANNTRVWVYCGNGKPSDLGGNNLPAKFLEGFVRTSNIKFQDAYNAGGGHNGVFDFPDSGTHSWEYWGAQLNAMKPDLQRALGATPNTGPAPQGATEQQWNFAGIEAAASAIQGNVTSIHSLLDEGKQSLTKLAAAWGGSGSEAYQGVQQKWDATATELNNALQNLARTISEAGQAMASTEGNVTGMFARATVGLVEAIGIRELRQHASRYLARVEAGEELGVTNKGRLVARLIPVQAAERSREALIESGVLIPARRPQNLLDVTAEPARGRKRTLSDVLNEMRDEQTTARDIMNAGVTCVGEHETLTAAAQYMREHDIGALPICGDDDRLHGMLTDRDIVIKGLAAGLDPNTATAGELARDSIYYVDANASIQEMLNVMEEHQVRRVPVISEHRLVGIVTEADIARHLPEHAIVQFVKAICSPMALASSGRHRKPTTSNVSVAKIAFTGAVLGGGGIAMAAQATAATDGEWDQVARCESGGNWSINTGNGYLGGLQFTQSTWAAHGGGEFAPSAQLASREQQIAVGERVLATQGRGAWPVCGRGLSNATPREVLPASAAMDAPLDAAAVNGEPAPLAPPPADPAPPVELAANDLPAPLGEPLPAAPADPAPPADLAPPAPADVAPPVELAVNDLPAPLGEPLPAAPADPAPPADLAPPAPADLAPPAPADLAPPAPADLAPPVELAVNDLPAPLGEPLPAAPAELAPPADLAPASADLAPPAPADLAPPAPAELAPPAPADLAPPAAVNEQTAPGDQPATAPGGPVGLATDLELPEPDPQPADAPPPGDVTEAPAETPQVSNIAYTKKLWQAIRAQDVCGNDALDSLAQPYVIGTPGLLTTAGAGRPRDRCARIVCTVFIETAVVATMFVALLGLSTISSKADDIDWDAIAQCESGGNWAANTGNGLYGGLQISQATWDSNGGVGSPAAASPQQQIEVADNIMKTQGPGAWPKCSSCSQGDAPLGSLTHILTFLAAETGGCSGSRDD

SEQ ID NO: 11 - protein, 296 aa, synthetic construct
  source 1..296: note = Ag85A fragment 1
AFSRPGLPVEYLQVPSPSMGRDIKVQFQSGGANSPALYLLDGLRAQDDFSGWDINTPAFEWYDQSGLSVVMPVGGQSSFYSDWYQPACGKAGCQTYKWETFLTSELPGWLQANRHVKPTGSAVVGLSMAASSALTLAIYHPQQFVYAGAMSGLLDPSQAMGPTLIGLAMGDAGGYKASDMWGPKEDPAWQRNDPLLNVGKLIANNTRVWVYCGNGKPSDLGGNNLPAKFLEGFVRTSNIKFQDAYNAGGGHNGVFDFPDSGTHSWEYWGAQLNAMKPDLQRALGATPNTGPAPQGA

SEQ ID NO: 12 - protein, 297 aa, synthetic construct
  source 1..297: note = Ag85A fragment 2
MAFSRPGLPVEYLQVPSPSMGRDIKVQFQSGGANSPALYLLDGLRAQDDFSGWDINTPAFEWYDQSGLSVVMPVGGQSSFYSDWYQPACGKAGCQTYKWETFLTSELPGWLQANRHVKPTGSAVVGLSMAASSALTLAIYHPQQFVYAGAMSGLLDPSQAMGPTLIGLAMGDAGGYKASDMWGPKEDPAWQRNDPLLNVGKLIANNTRVWVYCGNGKPSDLGGNNLPAKFLEGFVRTSNIKFQDAYNAGGGHNGVFDFPDSGTHSWEYWGAQLNAMKPDLQRALGATPNTGPAPQGA

SEQ ID NO: 13 - protein, 94 aa, synthetic construct
  source 1..94: note = ESAT-6 fragment
TEQQWNFAGIEAAASAIQGNVTSIHSLLDEGKQSLTKLAAAWGGSGSEAYQGVQQKWDATATELNNALQNLARTISEAGQAMASTEGNVTGMFA

SEQ ID NO: 14 - protein, 98 aa, synthetic construct
  source 1..98: note = Rv3407 fragment
RATVGLVEAIGIRELRQHASRYLARVEAGEELGVTNKGRLVARLIPVQAAERSREALIESGVLIPARRPQNLLDVTAEPARGRKRTLSDVLNEMRDEQ

SEQ ID NO: 15 - protein, 142 aa, synthetic construct
  source 1..142: note = Rv2626c fragment
TTARDIMNAGVTCVGEHETLTAAAQYMREHDIGALPICGDDDRLHGMLTDRDIVIKGLAAGLDPNTATAGELARDSIYYVDANASIQEMLNVMEEHQVRRVPVISEHRLVGIVTEADIARHLPEHAIVQFVKAICSPMALAS

SEQ ID NO: 16 - protein, 406 aa, synthetic construct
  source 1..406: note = RpfA fragment
SGRHRKPTTSNVSVAKIAFTGAVLGGGGIAMAAQATAATDGEWDQVARCESGGNWSINTGNGYLGGLQFTQSTWAAHGGGEFAPSAQLASREQQIAVGERVLATQGRGAWPVCGRGLSNATPREVLPASAAMDAPLDAAAVNGEPAPLAPPPADPAPPVELAANDLPAPLGEPLPAAPADPAPPADLAPPAPADVAPPVELAVNDLPAPLGEPLPAAPADPAPPADLAPPAPADLAPPAPADLAPPAPADLAPPVELAVNDLPAPLGEPLPAAPAELAPPADLAPASADLAPPAPADLAPPAPAELAPPAPADLAPPAAVNEQTAPGDQPATAPGGPVGLATDLELPEPDPQPADAPPPGDVTEAPAETPQVSNIAYTKKLWQAIRAQDVCGNDALDSLAQPYVIG

SEQ ID NO: 17 - protein, 153 aa, synthetic construct
  source 1..153: note = RpfD fragment
TPGLLTTAGAGRPRDRCARIVCTVFIETAVVATMFVALLGLSTISSKADDIDWDAIAQCESGGNWAANTGNGLYGGLQISQATWDSNGGVGSPAAASPQQQIEVADNIMKTQGPGAWPKCSSCSQGDAPLGSLTHILTFLAAETGGCSGSRDD

SEQ ID NO: 18 - protein, 723 aa, synthetic construct
  source 1..723: note = Ra12-TbH9-Ra35 fusion 1
MTAASDNFQLSQGGQGFAIPIGQAMAIAGQIRSGGGSPTVHIGPTAFLGLGVVDNNGNGARVQRVVGSAPAASLGISTGDVITAVDGAPINSATAMADALNGHHPGDVISVTWQTKSGGTRTGNVTLAEGPPAEFMVDFGALPPEINSARMYAGPGSASLVAAAQMWDSVASDLFSAASAFQSVVWGLTVGSWIGSSAGLMVAAASPYVAWMSVTAGQAELTAAQVRVAAAAYETAYGLTVPPPVIAENRAELMILIATNLLGQNTPAIAVNEAEYGEMWAQDAAAMFGYAAATATATATLLPFEEAPEMTSAGGLLEQAAAVEEASDTAAANQLMNNVPQALQQLAQPTQGTTPSSKLGGLWKTVSPHRSPISNMVSMANNHMSMTNSGVSMTNTLSSMLKGFAPAAAAQAVQTAAQNGVRAMSSLGSSLGSSGLGGGVAANLGRAASVGSLSVPQAWAAANQAVTPAARALPLTSLTSAAERGPGQMLGGLPVGQMGARAGGGLSGVLRVPPRPYVMPHSPAAGDIAPPALSQDRFADFPALPLDPSAMVAQVGPQVVNINTKLGYNNAVGAGTGIVIDPNGVVLTNNHVIAGATDINAFSVGSGQTYGVDVVGYDRTQDVAVLQLRGAGGLPSAAIGGGVAVGEPVVAMGNSGGQGGTPRAVPGRVVALGQTVQASDSLTGAEETLNGLIQFDAAIQPGDSGGPVVNGLGQVVGMNTAAS

SEQ ID NO: 19 - protein, 722 aa, synthetic construct
  source 1..722: note = Ra12-TbH9-Ra35 fusion 2
TAASDNFQLSQGGQGFAIPIGQAMAIAGQIRSGGGSPTVHIGPTAFLGLGVVDNNGNGARVQRVVGSAPAASLGISTGDVITAVDGAPINSATAMADALNGHHPGDVISVTWQTKSGGTRTGNVTLAEGPPAEFMVDFGALPPEINSARMYAGPGSASLVAAAQMWDSVASDLFSAASAFQSVVWGLTVGSWIGSSAGLMVAAASPYVAWMSVTAGQAELTAAQVRVAAAAYETAYGLTVPPPVIAENRAELMILIATNLLGQNTPAIAVNEAEYGEMWAQDAAAMFGYAAATATATATLLPFEEAPEMTSAGGLLEQAAAVEEASDTAAANQLMNNVPQALQQLAQPTQGTTPSSKLGGLWKTVSPHRSPISNMVSMANNHMSMTNSGVSMTNTLSSMLKGFAPAAAAQAVQTAAQNGVRAMSSLGSSLGSSGLGGGVAANLGRAASVGSLSVPQAWAAANQAVTPAARALPLTSLTSAAERGPGQMLGGLPVGQMGARAGGGLSGVLRVPPRPYVMPHSPAAGDIAPPALSQDRFADFPALPLDPSAMVAQVGPQVVNINTKLGYNNAVGAGTGIVIDPNGVVLTNNHVIAGATDINAFSVGSGQTYGVDVVGYDRTQDVAVLQLRGAGGLPSAAIGGGVAVGEPVVAMGNSGGQGGTPRAVPGRVVALGQTVQASDSLTGAEETLNGLIQFDAAIQPGDSGGPVVNGLGQVVGMNTAAS

SEQ ID NO: 20 - protein, 729 aa, synthetic construct
  source 1..729: note = 6xH Ra12-TbH9-Ra35 fusion
MHHHHHHTAASDNFQLSQGGQGFAIPIGQAMAIAGQIRSGGGSPTVHIGPTAFLGLGVVDNNGNGARVQRVVGSAPAASLGISTGDVITAVDGAPINSATAMADALNGHHPGDVISVTWQTKSGGTRTGNVTLAEGPPAEFMVDFGALPPEINSARMYAGPGSASLVAAAQMWDSVASDLFSAASAFQSVVWGLTVGSWIGSSAGLMVAAASPYVAWMSVTAGQAELTAAQVRVAAAAYETAYGLTVPPPVIAENRAELMILIATNLLGQNTPAIAVNEAEYGEMWAQDAAAMFGYAAATATATATLLPFEEAPEMTSAGGLLEQAAAVEEASDTAAANQLMNNVPQALQQLAQPTQGTTPSSKLGGLWKTVSPHRSPISNMVSMANNHMSMTNSGVSMTNTLSSMLKGFAPAAAAQAVQTAAQNGVRAMSSLGSSLGSSGLGGGVAANLGRAASVGSLSVPQAWAAANQAVTPAARALPLTSLTSAAERGPGQMLGGLPVGQMGARAGGGLSGVLRVPPRPYVMPHSPAAGDIAPPALSQDRFADFPALPLDPSAMVAQVGPQVVNINTKLGYNNAVGAGTGIVIDPNGVVLTNNHVIAGATDINAFSVGSGQTYGVDVVGYDRTQDVAVLQLRGAGGLPSAAIGGGVAVGEPVVAMGNSGGQGGTPRAVPGRVVALGQTVQASDSLTGAEETLNGLIQFDAAIQPGDSGGPVVNGLGQVVGMNTAAS

SEQ ID NO: 21 - protein, 725 aa, synthetic construct
  source 1..725: note = 2xH S710A Ra12-TbH9-Ra35 fusion 1
MHHTAASDNFQLSQGGQGFAIPIGQAMAIAGQIRSGGGSPTVHIGPTAFLGLGVVDNNGNGARVQRVVGSAPAASLGISTGDVITAVDGAPINSATAMADALNGHHPGDVISVTWQTKSGGTRTGNVTLAEGPPAEFMVDFGALPPEINSARMYAGPGSASLVAAAQMWDSVASDLFSAASAFQSVVWGLTVGSWIGSSAGLMVAAASPYVAWMSVTAGQAELTAAQVRVAAAAYETAYGLTVPPPVIAENRAELMILIATNLLGQNTPAIAVNEAEYGEMWAQDAAAMFGYAAATATATATLLPFEEAPEMTSAGGLLEQAAAVEEASDTAAANQLMNNVPQALQQLAQPTQGTTPSSKLGGLWKTVSPHRSPISNMVSMANNHMSMTNSGVSMTNTLSSMLKGFAPAAAAQAVQTAAQNGVRAMSSLGSSLGSSGLGGGVAANLGRAASVGSLSVPQAWAAANQAVTPAARALPLTSLTSAAERGPGQMLGGLPVGQMGARAGGGLSGVLRVPPRPYVMPHSPAAGDIAPPALSQDRFADFPALPLDPSAMVAQVGPQVVNINTKLGYNNAVGAGTGIVIDPNGVVLTNNHVIAGATDINAFSVGSGQTYGVDVVGYDRTQDVAVLQLRGAGGLPSAAIGGGVAVGEPVVAMGNSGGQGGTPRAVPGRVVALGQTVQASDSLTGAEETLNGLIQFDAAIQPGDAGGPVVNGLGQVVGMNTAAS

SEQ ID NO: 22 - protein, 722 aa, synthetic construct
  source 1..722: note = 0xH S710A Ra12-TbH9-Ra35 fusion 2
TAASDNFQLSQGGQGFAIPIGQAMAIAGQIRSGGGSPTVHIGPTAFLGLGVVDNNGNGARVQRVVGSAPAASLGISTGDVITAVDGAPINSATAMADALNGHHPGDVISVTWQTKSGGTRTGNVTLAEGPPAEFMVDFGALPPEINSARMYAGPGSASLVAAAQMWDSVASDLFSAASAFQSVVWGLTVGSWIGSSAGLMVAAASPYVAWMSVTAGQAELTAAQVRVAAAAYETAYGLTVPPPVIAENRAELMILIATNLLGQNTPAIAVNEAEYGEMWAQDAAAMFGYAAATATATATLLPFEEAPEMTSAGGLLEQAAAVEEASDTAAANQLMNNVPQALQQLAQPTQGTTPSSKLGGLWKTVSPHRSPISNMVSMANNHMSMTNSGVSMTNTLSSMLKGFAPAAAAQAVQTAAQNGVRAMSSLGSSLGSSGLGGGVAANLGRAASVGSLSVPQAWAAANQAVTPAARALPLTSLTSAAERGPGQMLGGLPVGQMGARAGGGLSGVLRVPPRPYVMPHSPAAGDIAPPALSQDRFADFPALPLDPSAMVAQVGPQVVNINTKLGYNNAVGAGTGIVIDPNGVVLTNNHVIAGATDINAFSVGSGQTYGVDVVGYDRTQDVAVLQLRGAGGLPSAAIGGGVAVGEPVVAMGNSGGQGGTPRAVPGRVVALGQTVQASDSLTGAEETLNGLIQFDAAIQPGDAGGPVVNGLGQVVGMNTAAS

SEQ ID NO: 23 - protein, 132 aa, synthetic construct
  source 1..132: note = Ra12 fragment
TAASDNFQLSQGGQGFAIPIGQAMAIAGQIRSGGGSPTVHIGPTAFLGLGVVDNNGNGARVQRVVGSAPAASLGISTGDVITAVDGAPINSATAMADALNGHHPGDVISVTWQTKSGGTRTGNVTLAEGPPA

SEQ ID NO: 24 - protein, 391 aa, synthetic construct; identical to SEQ ID NO: 8
  source 1..391: note = TbH9 fragment

SEQ ID NO: 25 - protein, 195 aa, synthetic construct
  source 1..195: note = Ra35 fragment
APPALSQDRFADFPALPLDPSAMVAQVGPQVVNINTKLGYNNAVGAGTGIVIDPNGVVLTNNHVIAGATDINAFSVGSGQTYGVDVVGYDRTQDVAVLQLRGAGGLPSAAIGGGVAVGEPVVAMGNSGGQGGTPRAVPGRVVALGQTVQASDSLTGAEETLNGLIQFDAAIQPGDSGGPVVNGLGQVVGMNTAAS

SEQ ID NO: 26 - protein, 195 aa, synthetic construct
  source 1..195: note = Ra35 fragment S710A
APPALSQDRFADFPALPLDPSAMVAQVGPQVVNINTKLGYNNAVGAGTGIVIDPNGVVLTNNHVIAGATDINAFSVGSGQTYGVDVVGYDRTQDVAVLQLRGAGGLPSAAIGGGVAVGEPVVAMGNSGGQGGTPRAVPGRVVALGQTVQASDSLTGAEETLNGLIQFDAAIQPGDAGGPVVNGLGQVVGMNTAAS

SEQ ID NO: 27 - protein, 1911 aa, synthetic construct
  source 1..1911: note = Ag85A-ESAT6-Rv3407-Rv2626c-RpfA-RpfD-Ra12-TbH9-Ra35 fusion 1
AFSRPGLPVEYLQVPSPSMGRDIKVQFQSGGANSPALYLLDGLRAQDDFSGWDINTPAFEWYDQSGLSVVMPVGGQSSFYSDWYQPACGKAGCQTYKWETFLTSELPGWLQANRHVKPTGSAVVGLSMAASSALTLAIYHPQQFVYAGAMSGLLDPSQAMGPTLIGLAMGDAGGYKASDMWGPKEDPAWQRNDPLLNVGKLIANNTRVWVYCGNGKPSDLGGNNLPAKFLEGFVRTSNIKFQDAYNAGGGHNGVFDFPDSGTHSWEYWGAQLNAMKPDLQRALGATPNTGPAPQGATEQQWNFAGIEAAASAIQGNVTSIHSLLDEGKQSLTKLAAAWGGSGSEAYQGVQQKWDATATELNNALQNLARTISEAGQAMASTEGNVTGMFARATVGLVEAIGIRELRQHASRYLARVEAGEELGVTNKGRLVARLIPVQAAERSREALIESGVLIPARRPQNLLDVTAEPARGRKRTLSDVLNEMRDEQTTARDIMNAGVTCVGEHETLTAAAQYMREHDIGALPICGDDDRLHGMLTDRDIVIKGLAAGLDPNTATAGELARDSIYYVDANASIQEMLNVMEEHQVRRVPVISEHRLVGIVTEADIARHLPEHAIVQFVKAICSPMALASSGRHRKPTTSNVSVAKIAFTGAVLGGGGIAMAAQATAATDGEWDQVARCESGGNWSINTGNGYLGGLQFTQSTWAAHGGGEFAPSAQLASREQQIAVGERVLATQGRGAWPVCGRGLSNATPREVLPASAAMDAPLDAAAVNGEPAPLAPPPADPAPPVELAANDLPAPLGEPLPAAPADPAPPADLAPPAPADVAPPVELAVNDLPAPLGEPLPAAPADPAPPADLAPPAPADLAPPAPADLAPPAPADLAPPVELAVNDLPAPLGEPLPAAPAELAPPADLAPASADLAPPAPADLAPPAPAELAPPAPADLAPPAAVNEQTAPGDQPATAPGGPVGLATDLELPEPDPQPADAPPPGDVTEAPAETPQVSNIAYTKKLWQAIRAQDVCGNDALDSLAQPYVIGTPGLLTTAGAGRPRDRCARIVCTVFIETAVVATMFVALLGLSTISSKADDIDWDAIAQCESGGNWAANTGNGLYGGLQISQATWDSNGGVGSPAAASPQQQIEVADNIMKTQGPGAWPKCSSCSQGDAPLGSLTHILTFLAAETGGCSGSRDDTAASDNFQLSQGGQGFAIPIGQAMAIAGQIRSGGGSPTVHIGPTAFLGLGVVDNNGNGARVQRVVGSAPAASLGISTGDVITAVDGAPINSATAMADALNGHHPGDVISVTWQTKSGGTRTGNVTLAEGPPAEFMVDFGALPPEINSARMYAGPGSASLVAAAQMWDSVASDLFSAASAFQSVVWGLTVGSWIGSSAGLMVAAASPYVAWMSVTAGQAELTAAQVRVAAAAYETAYGLTVPPPVIAENRAELMILIATNLLGQNTPAIAVNEAEYGEMWAQDAAAMFGYAAATATATATLLPFEEAPEMTSAGGLLEQAAAVEEASDTAAANQLMNNVPQALQQLAQPTQGTTPSSKLGGLWKTVSPHRSPISNMVSMANNHMSMTNSGVSMTNTLSSMLKGFAPAAAAQAVQTAAQNGVRAMSSLGSSLGSSGLGGGVAANLGRAASVGSLSVPQAWAAANQAVTPAARALPLTSLTSAAERGPGQMLGGLPVGQMGARAGGGLSGVLRVPPRPYVMPHSPAAGDIAPPALSQDRFADFPALPLDPSAMVAQVGPQVVNINTKLGYNNAVGAGTGIVIDPNGVVLTNNHVIAGATDINAFSVGSGQTYGVDVVGYDRTQDVAVLQLRGAGGLPSAAIGGGVAVGEPVVAMGNSGGQGGTPRAVPGRVVALGQTVQASDSLTGAEETLNGLIQFDAAIQPGDSGGPVVNGLGQVVGMNTAAS

SEQ ID NO: 28 - protein, 1912 aa, synthetic construct
  source 1..1912: note = Ag85A-ESAT6-Rv3407-Rv2626c-RpfA-RpfD-Ra12-TbH9-Ra35 fusion 2
MAFSRPGLPVEYLQVPSPSMGRDIKVQFQSGGANSPALYLLDGLRAQDDFSGWDINTPAFEWYDQSGLSVVMPVGGQSSFYSDWYQPACGKAGCQTYKWETFLTSELPGWLQANRHVKPTGSAVVGLSMAASSALTLAIYHPQQFVYAGAMSGLLDPSQAMGPTLIGLAMGDAGGYKASDMWGPKEDPAWQRNDPLLNVGKLIANNTRVWVYCGNGKPSDLGGNNLPAKFLEGFVRTSNIKFQDAYNAGGGHNGVFDFPDSGTHSWEYWGAQLNAMKPDLQRALGATPNTGPAPQGATEQQWNFAGIEAAASAIQGNVTSIHSLLDEGKQSLTKLAAAWGGSGSEAYQGVQQKWDATATELNNALQNLARTISEAGQAMASTEGNVTGMFARATVGLVEAIGIRELRQHASRYLARVEAGEELGVTNKGRLVARLIPVQAAERSREALIESGVLIPARRPQNLLDVTAEPARGRKRTLSDVLNEMRDEQTTARDIMNAGVTCVGEHETLTAAAQYMREHDIGALPICGDDDRLHGMLTDRDIVIKGLAAGLDPNTATAGELARDSIYYVDANASIQEMLNVMEEHQVRRVPVISEHRLVGIVTEADIARHLPEHAIVQFVKAICSPMALASSGRHRKPTTSNVSVAKIAFTGAVLGGGGIAMAAQATAATDGEWDQVARCESGGNWSINTGNGYLGGLQFTQSTWAAHGGGEFAPSAQLASREQQIAVGERVLATQGRGAWPVCGRGLSNATPREVLPASAAMDAPLDAAAVNGEPAPLAPPPADPAPPVELAANDLPAPLGEPLPAAPADPAPPADLAPPAPADVAPPVELAVNDLPAPLGEPLPAAPADPAPPADLAPPAPADLAPPAPADLAPPAPADLAPPVELAVNDLPAPLGEPLPAAPAELAPPADLAPASADLAPPAPADLAPPAPAELAPPAPADLAPPAAVNEQTAPGDQPATAPGGPVGLATDLELPEPDPQPADAPPPGDVTEAPAETPQVSNIAYTKKLWQAIRAQDVCGNDALDSLAQPYVIGTPGLLTTAGAGRPRDRCARIVCTVFIETAVVATMFVALLGLSTISSKADDIDWDAIAQCESGGNWAANTGNGLYGGLQISQATWDSNGGVGSPAAASPQQQIEVADNIMKTQGPGAWPKCSSCSQGDAPLGSLTHILTFLAAETGGCSGSRDDTAASDNFQLSQGGQGFAIPIGQAMAIAGQIRSGGGSPTVHIGPTAFLGLGVVDNNGNGARVQRVVGSAPAASLGISTGDVITAVDGAPINSATAMADALNGHHPGDVISVTWQTKSGGTRTGNVTLAEGPPAEFMVDFGALPPEINSARMYAGPGSASLVAAAQMWDSVASDLFSAASAFQSVVWGLTVGSWIGSSAGLMVAAASPYVAWMSVTAGQAELTAAQVRVAAAAYETAYGLTVPPPVIAENRAELMILIATNLLGQNTPAIAVNEAEYGEMWAQDAAAMFGYAAATATATATLLPFEEAPEMTSAGGLLEQAAAVEEASDTAAANQLMNNVPQALQQLAQPTQGTTPSSKLGGLWKTVSPHRSPISNMVSMANNHMSMTNSGVSMTNTLSSMLKGFAPAAAAQAVQTAAQNGVRAMSSLGSSLGSSGLGGGVAANLGRAASVGSLSVPQAWAAANQAVTPAARALPLTSLTSAAERGPGQMLGGLPVGQMGARAGGGLSGVLRVPPRPYVMPHSPAAGDIAPPALSQDRFADFPALPLDPSAMVAQVGPQVVNINTKLGYNNAVGAGTGIVIDPNGVVLTNNHVIAGATDINAFSVGSGQTYGVDVVGYDRTQDVAVLQLRGAGGLPSAAIGGGVAVGEPVVAMGNSGGQGGTPRAVPGRVVALGQTVQASDSLTGAEETLNGLIQFDAAIQPGDSGGPVVNGLGQVVGMNTAAS

SEQ ID NO: 29 - protein, 1911 aa, synthetic construct
  source 1..1911: note = Ag85A-ESAT6-Rv3407-Rv2626c-RpfA-RpfD-Ra12-TbH9-Ra35 S710A fusion 1
AFSRPGLPVEYLQVPSPSMGRDIKVQFQSGGANSPALYLLDGLRAQDDFSGWDINTPAFEWYDQSGLSVVMPVGGQSSFYSDWYQPACGKAGCQTYKWETFLTSELPGWLQANRHVKPTGSAVVGLSMAASSALTLAIYHPQQFVYAGAMSGLLDPSQAMGPTLIGLAMGDAGGYKASDMWGPKEDPAWQRNDPLLNVGKLIANNTRVWVYCGNGKPSDLGGNNLPAKFLEGFVRTSNIKFQDAYNAGGGHNGVFDFPDSGTHSWEYWGAQLNAMKPDLQRALGATPNTGPAPQGATEQQWNFAGIEAAASAIQGNVTSIHSLLDEGKQSLTKLAAAWGGSGSEAYQGVQQKWDATATELNNALQNLARTISEAGQAMASTEGNVTGMFARATVGLVEAIGIRELRQHASRYLARVEAGEELGVTNKGRLVARLIPVQAAERSREALIESGVLIPARRPQNLLDVTAEPARGRKRTLSDVLNEMRDEQTTARDIMNAGVTCVGEHETLTAAAQYMREHDIGALPICGDDDRLHGMLTDRDIVIKGLAAGLDPNTATAGELARDSIYYVDANASIQEMLNVMEEHQVRRVPVISEHRLVGIVTEADIARHLPEHAIVQFVKAICSPMALASSGRHRKPTTSNVSVAKIAFTGAVLGGGGIAMAAQATAATDGEWDQVARCESGGNWSINTGNGYLGGLQFTQSTWAAHGGGEFAPSAQLASREQQIAVGERVLATQGRGAWPVCGRGLSNATPREVLPASAAMDAPLDAAAVNGEPAPLAPPPADPAPPVELAANDLPAPLGEPLPAAPADPAPPADLAPPAPADVAPPVELAVNDLPAPLGEPLPAAPADPAPPADLAPPAPADLAPPAPADLAPPAPADLAPPVELAVNDLPAPLGEPLPAAPAELAPPADLAPASADLAPPAPADLAPPAPAELAPPAPADLAPPAAVNEQTAPGDQPATAPGGPVGLATDLELPEPDPQPADAPPPGDVTEAPAETPQVSNIAYTKKLWQAIRAQDVCGNDALDSLAQPYVIGTPGLLTTAGAGRPRDRCARIVCTVFIETAVVATMFVALLGLSTISSKADDIDWDAIAQCESGGNWAANTGNGLYGGLQISQATWDSNGGVGSPAAASPQQQIEVADNIMKTQGPGAWPKCSSCSQGDAPLGSLTHILTFLAAETGGCSGSRDDTAASDNFQLSQGGQGFAIPIGQAMAIAGQIRSGGGSPTVHIGPTAFLGLGVVDNNGNGARVQRVVGSAPAASLGISTGDVITAVDGAPINSATAMADALNGHHPGDVISVTWQTKSGGTRTGNVTLAEGPPAEFMVDFGALPPEINSARMYAGPGSASLVAAAQMWDSVASDLFSAASAFQSVVWGLTVGSWIGSSAGLMVAAASPYVAWMSVTAGQAELTAAQVRVAAAAYETAYGLTVPPPVIAENRAELMILIATNLLGQNTPAIAVNEAEYGEMWAQDAAAMFGYAAATATATATLLPFEEAPEMTSAGGLLEQAAAVEEASDTAAANQLMNNVPQALQQLAQPTQGTTPSSKLGGLWKTVSPHRSPISNMVSMANNHMSMTNSGVSMTNTLSSMLKGFAPAAAAQAVQTAAQNGVRAMSSLGSSLGSSGLGGGVAANLGRAASVGSLSVPQAWAAANQAVTPAARALPLTSLTSAAERGPGQMLGGLPVGQMGARAGGGLSGVLRVPPRPYVMPHSPAAGDIAPPALSQDRFADFPALPLDPSAMVAQVGPQVVNINTKLGYNNAVGAGTGIVIDPNGVVLTNNHVIAGATDINAFSVGSGQTYGVDVVGYDRTQDVAVLQLRGAGGLPSAAIGGGVAVGEPVVAMGNSGGQGGTPRAVPGRVVALGQTVQASDSLTGAEETLNGLIQFDAAIQPGDAGGPVVNGLGQVVGMNTAAS

SEQ ID NO: 30 - protein, 1912 aa, synthetic construct
  source 1..1912: note = Ag85A-ESAT6-Rv3407-Rv2626c-RpfA-RpfD-Ra12-TbH9-Ra35 S710A fusion 2
MAFSRPGLPVEYLQVPSPSMGRDIKVQFQSGGANSPALYLLDGLRAQDDFSGWDINTPAFEWYDQSGLSVVMPVGGQSSFYSDWYQPACGKAGCQTYKWETFLTSELPGWLQANRHVKPTGSAVVGLSMAASSALTLAIYHPQQFVYAGAMSGLLDPSQAMGPTLIGLAMGDAGGYKASDMWGPKEDPAWQRNDPLLNVGKLIANNTRVWVYCGNGKPSDLGGNNLPAKFLEGFVRTSNIKFQDAYNAGGGHNGVFDFPDSGTHSWEYWGAQLNAMKPDLQRALGATPNTGPAPQGATEQQWNFAGIEAAASAIQGNVTSIHSLLDEGKQSLTKLAAAWGGSGSEAYQGVQQKWDATATELNNALQNLARTISEAGQAMASTEGNVTGMFARATVGLVEAIGIRELRQHASRYLARVEAGEELGVTNKGRLVARLIPVQAAERSREALIESGVLIPARRPQNLLDVTAEPARGRKRTLSDVLNEMRDEQTTARDIMNAGVTCVGEHETLTAAAQYMREHDIGALPICGDDDRLHGMLTDRDIVIKGLAAGLDPNTATAGELARDSIYYVDANASIQEMLNVMEEHQVRRVPVISEHRLVGIVTEADIARHLPEHAIVQFVKAICSPMALASSGRHRKPTTSNVSVAKIAFTGAVLGGGGIAMAAQATAATDGEWDQVARCESGGNWSINTGNGYLGGLQFTQSTWAAHGGGEFAPSAQLASREQQIAVGERVLATQGRGAWPVCGRGLSNATPREVLPASAAMDAPLDAAAVNGEPAPLAPPPADPAPPVELAANDLPAPLGEPLPAAPADPAPPADLAPPAPADVAPPVELAVNDLPAPLGEPLPAAPADPAPPADLAPPAPADLAPPAPADLAPPAPADLAPPVELAVNDLPAPLGEPLPAAPAELAPPADLAPASADLAPPAPADLAPPAPAELAPPAPADLAPPAAVNEQTAPGDQPATAPGGPVGLATDLELPEPDPQPADAPPPGDVTEAPAETPQVSNIAYTKKLWQAIRAQDVCGNDALDSLAQPYVIGTPGLLTTAGAGRPRDRCARIVCTVFIETAVVATMFVALLGLSTISSKADDIDWDAIAQCESGGNWAANTGNGLYGGLQISQATWDSNGGVGSPAAASPQQQIEVADNIMKTQGPGAWPKCSSCSQGDAPLGSLTHILTFLAAETGGCSGSRDDTAASDNFQLSQGGQGFAIPIGQAMAIAGQIRSGGGSPTVHIGPTAFLGLGVVDNNGNGARVQRVVGSAPAASLGISTGDVITAVDGAPINSATAMADALNGHHPGDVISVTWQTKSGGTRTGNVTLAEGPPAEFMVDFGALPPEINSARMYAGPGSASLVAAAQMWDSVASDLFSAASAFQSVVWGLTVGSWIGSSAGLMVAAASPYVAWMSVTAGQAELTAAQVRVAAAAYETAYGLTVPPPVIAENRAELMILIATNLLGQNTPAIAVNEAEYGEMWAQDAAAMFGYAAATATATATLLPFEEAPEMTSAGGLLEQAAAVEEASDTAAANQLMNNVPQALQQLAQPTQGTTPSSKLGGLWKTVSPHRSPISNMVSMANNHMSMTNSGVSMTNTLSSMLKGFAPAAAAQAVQTAAQNGVRAMSSLGSSLGSSGLGGGVAANLGRAASVGSLSVPQAWAAANQAVTPAARALPLTSLTSAAERGPGQMLGGLPVGQMGARAGGGLSGVLRVPPRPYVMPHSPAAGDIAPPALSQDRFADFPALPLDPSAMVAQVGPQVVNINTKLGYNNAVGAGTGIVIDPNGVVLTNNHVIAGATDINAFSVGSGQTYGVDVVGYDRTQDVAVLQLRGAGGLPSAAIGGGVAVGEPVVAMGNSGGQGGTPRAVPGRVVALGQTVQASDSLTGAEETLNGLIQFDAAIQPGDAGGPVVNGLGQVVGMNTAAS

SEQ ID NO: 31 - protein, 1580 aa, synthetic construct
  source 1..1580: note = Ag85A-ESAT6-Rv3407-Rv2626c-RpfA-RpfD-TbH9 fusion 1
AFSRPGLPVEYLQVPSPSMGRDIKVQFQSGGANSPALYLLDGLRAQDDFSGWDINTPAFEWYDQSGLSVVMPVGGQSSFYSDWYQPACGKAGCQTYKWETFLTSELPGWLQANRHVKPTGSAVVGLSMAASSALTLAIYHPQQFVYAGAMSGLLDPSQAMGPTLIGLAMGDAGGYKASDMWGPKEDPAWQRNDPLLNVGKLIANNTRVWVYCGNGKPSDLGGNNLPAKFLEGFVRTSNIKFQDAYNAGGGHNGVFDFPDSGTHSWEYWGAQLNAMKPDLQRALGATPNTGPAPQGATEQQWNFAGIEAAASAIQGNVTSIHSLLDEGKQSLTKLAAAWGGSGSEAYQGVQQKWDATATELNNALQNLARTISEAGQAMASTEGNVTGMFARATVGLVEAIGIRELRQHASRYLARVEAGEELGVTNKGRLVARLIPVQAAERSREALIESGVLIPARRPQNLLDVTAEPARGRKRTLSDVLNEMRDEQTTARDIMNAGVTCVGEHETLTAAAQYMREHDIGALPICGDDDRLHGMLTDRDIVIKGLAAGLDPNTATAGELARDSIYYVDANASIQEMLNVMEEHQVRRVPVISEHRLVGIVTEADIARHLPEHAIVQFVKAICSPMALASSGRHRKPTTSNVSVAKIAFTGAVLGGGGIAMAAQATAATDGEWDQVARCESGGNWSINTGNGYLGGLQFTQSTWAAHGGGEFAPSAQLASREQQIAVGERVLATQGRGAWPVCGRGLSNATPREVLPASAAMDAPLDAAAVNGEPAPLAPPPADPAPPVELAANDLPAPLGEPLPAAPADPAPPADLAPPAPADVAPPVELAVNDLPAPLGEPLPAAPADPAPPADLAPPAPADLAPPAPADLAPPAPADLAPPVELAVNDLPAPLGEPLPAAPAELAPPADLAPASADLAPPAPADLAPPAPAELAPPAPADLAPPAAVNEQTAPGDQPATAPGGPVGLATDLELPEPDPQPADAPPPGDVTEAPAETPQVSNIAYTKKLWQAIRAQDVCGNDALDSLAQPYVIGTPGLLTTAGAGRPRDRCARIVCTVFIETAVVATMFVALLGLSTISSKADDIDWDAIAQCESGGNWAANTGNGLYGGLQISQATWDSNGGVGSPAAASPQQQIEVADNIMKTQGPGAWPKCSSCSQGDAPLGSLTHILTFLAAETGGCSGSRDDMVDFGALPPEINSARMYAGPGSASLVAAAQMWDSVASDLFSAASAFQSVVWGLTVGSWIGSSAGLMVAAASPYVAWMSVTAGQAELTAAQVRVAAAAYETAYGLTVPPPVIAENRAELMILIATNLLGQNTPAIAVNEAEYGEMWAQDAAAMFGYAAATATATATLLPFEEAPEMTSAGGLLEQAAAVEEASDTAAANQLMNNVPQALQQLAQPTQGTTPSSKLGGLWKTVSPHRSPISNMVSMANNHMSMTNSGVSMTNTLSSMLKGFAPAAAAQAVQTAAQNGVRAMSSLGSSLGSSGLGGGVAANLGRAASVGSLSVPQAWAAANQAVTPAARALPLTSLTSAAERGPGQMLGGLPVGQMGARAGGGLSGVLRVPPRPYVMPHSPAAG

SEQ ID NO: 32 - protein, 1581 aa, synthetic construct
  source 1..1581: note = Ag85A-ESAT6-Rv3407-Rv2626c-RpfA-RpfD-TbH9 fusion 2
MAFSRPGLPVEYLQVPSPSMGRDIKVQFQSGGANSPALYLLDGLRAQDDFSGWDINTPAFEWYDQSGLSVVMPVGGQSSFYSDWYQPACGKAGCQTYKWETFLTSELPGWLQANRHVKPTGSAVVGLSMAASSALTLAIYHPQQFVYAGAMSGLLDPSQAMGPTLIGLAMGDAGGYKASDMWGPKEDPAWQRNDPLLNVGKLIANNTRVWVYCGNGKPSDLGGNNLPAKFLEGFVRTSNIKFQDAYNAGGGHNGVFDFPDSGTHSWEYWGAQLNAMKPDLQRALGATPNTGPAPQGATEQQWNFAGIEAAASAIQGNVTSIHSLLDEGKQSLTKLAAAWGGSGSEAYQGVQQKWDATATELNNALQNLARTISEAGQAMASTEGNVTGMFARATVGLVEAIGIRELRQHASRYLARVEAGEELGVTNKGRLVARLIPVQAAERSREALIESGVLIPARRPQNLLDVTAEPARGRKRTLSDVLNEMRDEQTTARDIMNAGVTCVGEHETLTAAAQYMREHDIGALPICGDDDRLHGMLTDRDIVIKGLAAGLDPNTATAGELARDSIYYVDANASIQEMLNVMEEHQVRRVPVISEHRLVGIVTEADIARHLPEHAIVQFVKAICSPMALASSGRHRKPTTSNVSVAKIAFTGAVLGGGGIAMAAQATAATDGEWDQVARCESGGNWSINTGNGYLGGLQFTQSTWAAHGGGEFAPSAQLASREQQIAVGERVLATQGRGAWPVCGRGLSNATPREVLPASAAMDAPLDAAAVNGEPAPLAPPPADPAPPVELAANDLPAPLGEPLPAAPADPAPPADLAPPAPADVAPPVELAVNDLPAPLGEPLPAAPADPAPPADLAPPAPADLAPPAPADLAPPAPADLAPPVELAVNDLPAPLGEPLPAAPAELAPPADLAPASADLAPPAPADLAPPAPAELAPPAPADLAPPAAVNEQTAPGDQPATAPGGPVGLATDLELPEPDPQPADAPPPGDVTEAPAETPQVSNIAYTKKLWQAIRAQDVCGNDALDSLAQPYVIGTPGLLTTAGAGRPRDRCARIVCTVFIETAVVATMFVALLGLSTISSKADDIDWDAIAQCESGGNWAANTGNGLYGGLQISQATWDSNGGVGSPAAASPQQQIEVADNIMKTQGPGAWPKCSSCSQGDAPLGSLTHILTFLAAETGGCSGSRDDMVDFGALPPEINSARMYAGPGSASLVAAAQMWDSVASDLFSAASAFQSVVWGLTVGSWIGSSAGLMVAAASPYVAWMSVTAGQAELTAAQVRVAAAAYETAYGLTVPPPVIAENRAELMILIATNLLGQNTPAIAVNEAEYGEMWAQDAAAMFGYAAATATATATLLPFEEAPEMTSAGGLLEQAAAVEEASDTAAANQLMNNVPQALQQLAQPTQGTTPSSKLGGLWKTVSPHRSPISNMVSMANNHMSMTNSGVSMTNTLSSMLKGFAPAAAAQAVQTAAQNGVRAMSSLGSSLGSSGLGGGVAANLGRAASVGSLSVPQAWAAANQAVTPAARALPLTSLTSAAERGPGQMLGGLPVGQMGARAGGGLSGVLRVPPRPYVMPHSPAAG

SEQ ID NO: 33 - protein, 1505 aa, synthetic construct
  source 1..1505: note = Ag85A-ESAT6-Rv3407-Rv2626c-RpfD-Ra12-TbH9-Ra35 fusion 1
AFSRPGLPVEYLQVPSPSMGRDIKVQFQSGGANSPALYLLDGLRAQDDFSGWDINTPAFEWYDQSGLSVVMPVGGQSSFYSDWYQPACGKAGCQTYKWETFLTSELPGWLQANRHVKPTGSAVVGLSMAASSALTLAIYHPQQFVYAGAMSGLLDPSQAMGPTLIGLAMGDAGGYKASDMWGPKEDPAWQRNDPLLNVGKLIANNTRVWVYCGNGKPSDLGGNNLPAKFLEGFVRTSNIKFQDAYNAGGGHNGVFDFPDSGTHSWEYWGAQLNAMKPDLQRALGATPNTGPAPQGATEQQWNFAGIEAAASAIQGNVTSIHSLLDEGKQSLTKLAAAWGGSGSEAYQGVQQKWDATATELNNALQNLARTISEAGQAMASTEGNVTGMFARATVGLVEAIGIRELRQHASRYLARVEAGEELGVTNKGRLVARLIPVQAAERSREALIESGVLIPARRPQNLLDVTAEPARGRKRTLSDVLNEMRDEQTTARDIMNAGVTCVGEHETLTAAAQYMREHDIGALPICGDDDRLHGMLTDRDIVIKGLAAGLDPNTATAGELARDSIYYVDANASIQEMLNVMEEHQVRRVPVISEHRLVGIVTEADIARHLPEHAIVQFVKAICSPMALASTPGLLTTAGAGRPRDRCARIVCTVFIETAVVATMFVALLGLSTISSKADDIDWDAIAQCESGGNWAANTGNGLYGGLQISQATWDSNGGVGSPAAASPQQQIEVADNIMKTQGPGAWPKCSSCSQGDAPLGSLTHILTFLAAETGGCSGSRDDTAASDNFQLSQGGQGFAIPIGQAMAIAGQIRSGGGSPTVHIGPTAFLGLGVVDNNGNGARVQRVVGSAPAASLGISTGDVITAVDGAPINSATAMADALNGHHPGDVISVTWQTKSGGTRTGNVTLAEGPPAEFMVDFGALPPEINSARMYAGPGSASLVAAAQMWDSVASDLFSAASAFQSVVWGLTVGSWIGSSAGLMVAAASPYVAWMSVTAGQAELTAAQVRVAAAAYETAYGLTVPPPVIAENRAELMILIATNLLGQNTPAIAVNEAEYGEMWAQDAAAMFGYAAATATATATLLPFEEAPEMTSAGGLLEQAAAVEEASDTAAANQLMNNVPQALQQLAQPTQGTTPSSKLGGLWKTVSPHRSPISNMVSMANNHMSMTNSGVSMTNTLSSMLKGFAPAAAAQAVQTAAQNGVRAMSSLGSSLGSSGLGGGVAANLGRAASVGSLSVPQAWAAANQAVTPAARALPLTSLTSAAERGPGQMLGGLPVGQMGARAGGGLSGVLRVPPRPYVMPHSPAAGDIAPPALSQDRFADFPALPLDPSAMVAQVGPQVVNINTKLGYNNAVGAGTGIVIDPNGVVLTNNHVIAGATDINAFSVGSGQTYGVDVVGYDRTQDVAVLQLRGAGGLPSAAIGGGVAVGEPVVAMGNSGGQGGTPRAVPGRVVALGQTVQASDSLTGAEETLNGLIQFDAAIQPGDSGGPVVNGLGQVVGMNTAAS

SEQ ID NO: 34 - protein, 1506 aa, synthetic construct
  source 1..1506: note = Ag85A-ESAT6-Rv3407-Rv2626c-RpfD-Ra12-TbH9-Ra35 fusion 2
MAFSRPGLPVEYLQVPSPSMGRDIKVQFQSGGANSPALYLLDGLRAQDDFSGWDINTPAFEWYDQSGLSVVMPVGGQSSFYSDWYQPACGKAGCQTYKWETFLTSELPGWLQANRHVKPTGSAVVGLSMAASSALTLAIYHPQQFVYAGAMSGLLDPSQAMGPTLIGLAMGDAGGYKASDMWGPKEDPAWQRNDPLLNVGKLIANNTRVWVYCGNGKPSDLGGNNLPAKFLEGFVRTSNIKFQDAYNAGGGHNGVFDFPDSGTHSWEYWGAQLNAMKPDLQRALGATPNTGPAPQGATEQQWNFAGIEAAASAIQGNVTSIHSLLDEGKQSLTKLAAAWGGSGSEAYQGVQQKWDATATELNNALQNLARTISEAGQAMASTEGNVTGMFARATVGLVEAIGIRELRQHASRYLARVEAGEELGVTNKGRLVARLIPVQAAERSREALIESGVLIPARRPQNLLDVTAEPARGRKRTLSDVLNEMRDEQTTARDIMNAGVTCVGEHETLTAAAQYMREHDIGALPICGDDDRLHGMLTDRDIVIKGLAAGLDPNTATAGELARDSIYYVDANASIQEMLNVMEEHQVRRVPVISEHRLVGIVTEADIARHLPEHAIVQFVKAICSPMALASTPGLLTTAGAGRPRDRCARIVCTVFIETAVVATMFVALLGLSTISSKADDIDWDAIAQCESGGNWAANTGNGLYGGLQISQATWDSNGGVGSPAAASPQQQIEVADNIMKTQGPGAWPKCSSCSQGDAPLGSLTHILTFLAAETGGCSGSRDDTAASDNFQLSQGGQGFAIPIGQAMAIAGQIRSGGGSPTVHIGPTAFLGLGVVDNNGNGARVQRVVGSAPAASLGISTGDVITAVDGAPINSATAMADALNGHHPGDVISVTWQTKSGGTRTGNVTLAEGPPAEFMVDFGALPPEINSARMYAGPGSASLVAAAQMWDSVASDLFSAASAFQSVVWGLTVGSWIGSSAGLMVAAASPYVAWMSVTAGQAELTAAQVRVAAAAYETAYGLTVPPPVIAENRAELMILIATNLLGQNTPAIAVNEAEYGEMWAQDAAAMFGYAAATATATATLLPFEEAPEMTSAGGLLEQAAAVEEASDTAAANQLMNNVPQALQQLAQPTQGTTPSSKLGGLWKTVSPHRSPISNMVSMANNHMSMTNSGVSMTNTLSSMLKGFAPAAAAQAVQTAAQNGVRAMSSLGSSLGSSGLGGGVAANLGRAASVGSLSVPQAWAAANQAVTPAARALPLTSLTSAAERGPGQMLGGLPVGQMGARAGGGLSGVLRVPPRPYVMPHSPAAGDIAPPALSQDRFADFPALPLDPSAMVAQVGPQVVNINTKLGYNNAVGAGTGIVIDPNGVVLTNNHVIAGATDINAFSVGSGQTYGVDVVGYDRTQDVAVLQLRGAGGLPSAAIGGGVAVGEPVVAMGNSGGQGGTPRAVPGRVVALGQTVQASDSLTGAEETLNGLIQFDAAIQPGDSGGPVVNGLGQVVGMNTAAS

SEQ ID NO: 35 - protein, 1505 aa, synthetic construct
  source 1..1505: note = Ag85A-ESAT6-Rv3407-Rv2626c-RpfD-Ra12-TbH9-Ra35 S710A fusion 1
AFSRPGLPVEYLQVPSPSMGRDIKVQFQSGGANSPALYLLDGLRAQDDFSGWDINTPAFEWYDQSGLSVVMPVGGQSSFYSDWYQPACGKAGCQTYKWETFLTSELPGWLQANRHVKPTGSAVVGLSMAASSALTLAIYHPQQFVYAGAMSGLLDPSQAMGPTLIGLAMGDAGGYKASDMWGPKEDPAWQRNDPLLNVGKLIANNTRVWVYCGNGKPSDLGGNNLPAKFLEGFVRTSNIKFQDAYNAGGGHNGVFDFPDSGTHSWEYWGAQLNAMKPDLQRALGATPNTGPAPQGATEQQWNFAGIEAAASAIQGNVTSIHSLLDEGKQSLTKLAAAWGGSGSEAYQGVQQKWDATATELNNALQNLARTISEAGQAMASTEGNVTGMFARATVGLVEAIGIRELRQHASRYLARVEAGEELGVTNKGRLVARLIPVQAAERSREALIESGVLIPARRPQNLLDVTAEPARGRKRTLSDVLNEMRDEQTTARDIMNAGVTCVGEHETLTAAAQYMREHDIGALPICGDDDRLHGMLTDRDIVIKGLAAGLDPNTATAGELARDSIYYVDANASIQEMLNVMEEHQVRRVPVISEHRLVGIVTEADIARHLPEHAIVQFVKAICSPMALASTPGLLTTAGAGRPRDRCARIVCTVFIETAVVATMFVALLGLSTISSKADDIDWDAIAQCESGGNWAANTGNGLYGGLQISQATWDSNGGVGSPAAASPQQQIEVADNIMKTQGPGAWPKCSSCSQGDAPLGSLTHILTFLAAETGGCSGSRDDTAASDNFQLSQGGQGFAIPIGQAMAIAGQIRSGGGSPTVHIGPTAFLGLGVVDNNGNGARVQRVVGSAPAASLGISTGDVITAVDGAPINSATAMADALNGHHPGDVISVTWQTKSGGTRTGNVTLAEGPPAEFMVDFGALPPEINSARMYAGPGSASLVAAAQMWDSVASDLFSAASAFQSVVWGLTVGSWIGSSAGLMVAAASPYVAWMSVTAGQAELTAAQVRVAAAAYETAYGLTVPPPVIAENRAELMILIATNLLGQNTPAIAVNEAEYGEMWAQDAAAMFGYAAATATATATLLPFEEAPEMTSAGGLLEQAAAVEEASDTAAANQLMNNVPQALQQLAQPTQGTTPSSKLGGLWKTVSPHRSPISNMVSMANNHMSMTNSGVSMTNTLSSMLKGFAPAAAAQAVQTAAQNGVRAMSSLGSSLGSSGLGGGVAANLGRAASVGSLSVPQAWAAANQAVTPAARALPLTSLTSAAERGPGQMLGGLPVGQMGARAGGGLSGVLRVPPRPYVMPHSPAAGDIAPPALSQDRFADFPALPLDPSAMVAQVGPQVVNINTKLGYNNAVGAGTGIVIDPNGVVLTNNHVIAGATDINAFSVGSGQTYGVDVVGYDRTQDVAVLQLRGAGGLPSAAIGGGVAVGEPVVAMGNSGGQGGTPRAVPGRVVALGQTVQASDSLTGAEETLNGLIQFDAAIQPGDAGGPVVNGLGQVVGMNTAAS

SEQ ID NO: 36 - protein, 1506 aa, synthetic construct
  source 1..1506: note = Ag85A-ESAT6-Rv3407-Rv2626c-RpfD-Ra12-TbH9-Ra35 S710A fusion 1
MAFSRPGLPVEYLQVPSPSMGRDIKVQFQSGGANSPALYLLDGLRAQDDFSGWDINTPAFEWYDQSGLSVVMPVGGQSSFYSDWYQPACGKAGCQTYKWETFLTSELPGWLQANRHVKPTGSAVVGLSMAASSALTLAIYHPQQFVYAGAMSGLLDPSQAMGPTLIGLAMGDAGGYKASDMWGPKEDPAWQRNDPLLNVGKLIANNTRVWVYCGNGKPSDLGGNNLPAKFLEGFVRTSNIKFQDAYNAGGGHNGVFDFPDSGTHSWEYWGAQLNAMKPDLQRALGATPNTGPAPQGATEQQWNFAGIEAAASAIQGNVTSIHSLLDEGKQSLTKLAAAWGGSGSEAYQGVQQKWDATATELNNALQNLARTISEAGQAMASTEGNVTGMFARATVGLVEAIGIRELRQHASRYLARVEAGEELGVTNKGRLVARLIPVQAAERSREALIESGVLIPARRPQNLLDVTAEPARGRKRTLSDVLNEMRDEQTTARDIMNAGVTCVGEHETLTAAAQYMREHDIGALPICGDDDRLHGMLTDRDIVIKGLAAGLDPNTATAGELARDSIYYVDANASIQEMLNVMEEHQVRRVPVISEHRLVGIVTEADIARHLPEHAIVQFVKAICSPMALASTPGLLTTAGAGRPRDRCARIVCTVFIETAVVATMFVALLGLSTISSKADDIDWDAIAQCESGGNWAANTGNGLYGGLQISQATWDSNGGVGSPAAASPQQQIEVADNIMKTQGPGAWPKCSSCSQGDAPLGSLTHILTFLAAETGGCSGSRDDTAASDNFQLSQGGQGFAIPIGQAMAIAGQIRSGGGSPTVHIGPTAFLGLGVVDNNGNGARVQRVVGSAPAASLGISTGDVITAVDGAPINSATAMADALNGHHPGDVISVTWQTKSGGTRTGNVTLAEGPPAEFMVDFGALPPEINSARMYAGPGSASLVAAAQMWDSVASDLFSAASAFQSVVWGLTVGSWIGSSAGLMVAAASPYVAWMSVTAGQAELTAAQVRVAAAAYETAYGLTVPPPVIAENRAELMILIATNLLGQNTPAIAVNEAEYGEMWAQDAAAMFGYAAATATATATLLPFEEAPEMTSAGGLLEQAAAVEEASDTAAANQLMNNVPQALQQLAQPTQGTTPSSKLGGLWKTVSPHRSPISNMVSMANNHMSMTNSGVSMTNTLSSMLKGFAPAAAAQAVQTAAQNGVRAMSSLGSSLGSSGLGGGVAANLGRAASVGSLSVPQAWAAANQAVTPAARALPLTSLTSAAERGPGQMLGGLPVGQMGARAGGGLSGVLRVPPRPYVMPHSPAAGDIAPPALSQDRFADFPALPLDPSAMVAQVGPQVVNINTKLGYNNAVGAGTGIVIDPNGVVLTNNHVIAGATDINAFSVGSGQTYGVDVVGYDRTQDVAVLQLRGAGGLPSAAIGGGVAVGEPVVAMGNSGGQGGTPRAVPGRVVALGQTVQASDSLTGAEETLNGLIQFDAAIQPGDAGGPVVNGLGQVVGMNTAAS

SEQ ID NO: 37 - protein, 1174 aa, synthetic construct
  source 1..1174: note = Ag85A-ESAT6-Rv3407-Rv2626c-RpfD-TbH9 fusion 1
AFSRPGLPVEYLQVPSPSMGRDIKVQFQSGGANSPALYLLDGLRAQDDFSGWDINTPAFEWYDQSGLSVVMPVGGQSSFYSDWYQPACGKAGCQTYKWETFLTSELPGWLQANRHVKPTGSAVVGLSMAASSALTLAIYHPQQFVYAGAMSGLLDPSQAMGPTLIGLAMGDAGGYKASDMWGPKEDPAWQRNDPLLNVGKLIANNTRVWVYCGNGKPSDLGGNNLPAKFLEGFVRTSNIKFQDAYNAGGGHNGVFDFPDSGTHSWEYWGAQLNAMKPDLQRALGATPNTGPAPQGATEQQWNFAGIEAAASAIQGNVTSIHSLLDEGKQSLTKLAAAWGGSGSEAYQGVQQKWDATATELNNALQNLARTISEAGQAMASTEGNVTGMFARATVGLVEAIGIRELRQHASRYLARVEAGEELGVTNKGRLVARLIPVQAAERSREALIESGVLIPARRPQNLLDVTAEPARGRKRTLSDVLNEMRDEQTTARDIMNAGVTCVGEHETLTAAAQYMREHDIGALPICGDDDRLHGMLTDRDIVIKGLAAGLDPNTATAGELARDSIYYVDANASIQEMLNVMEEHQVRRVPVISEHRLVGIVTEADIARHLPEHAIVQFVKAICSPMALASTPGLLTTAGAGRPRDRCARIVCTVFIETAVVATMFVALLGLSTISSKADDIDWDAIAQCESGGNWAANTGNGLYGGLQISQATWDSNGGVGSPAAASPQQQIEVADNIMKTQGPGAWPKCSSCSQGDAPLGSLTHILTFLAAETGGCSGSRDDMVDFGALPPEINSARMYAGPGSASLVAAAQMWDSVASDLFSAASAFQSVVWGLTVGSWIGSSAGLMVAAASPYVAWMSVTAGQAELTAAQVRVAAAAYETAYGLTVPPPVIAENRAELMILIATNLLGQNTPAIAVNEAEYGEMWAQDAAAMFGYAAATATATATLLPFEEAPEMTSAGGLLEQAAAVEEASDTAAANQLMNNVPQALQQLAQPTQGTTPSSKLGGLWKTVSPHRSPISNMVSMANNHMSMTNSGVSMTNTLSSMLKGFAPAAAAQAVQTAAQNGVRAMSSLGSSLGSSGLGGGVAANLGRAASVGSLSVPQAWAAANQAVTPAARALPLTSLTSAAERGPGQMLGGLPVGQMGARAGGGLSGVLRVPPRPYVMPHSPAAG

SEQ ID NO: 38 - protein, 1175 aa, synthetic construct
  source 1..1175: note = Ag85A-ESAT6-Rv3407-Rv2626c-RpfD-TbH9 fusion 2
MAFSRPGLPVEYLQVPSPSMGRDIKVQFQSGGANSPALYLLDGLRAQDDFSGWDINTPAFEWYDQSGLSVVMPVGGQSSFYSDWYQPACGKAGCQTYKWETFLTSELPGWLQANRHVKPTGSAVVGLSMAASSALTLAIYHPQQFVYAGAMSGLLDPSQAMGPTLIGLAMGDAGGYKASDMWGPKEDPAWQRNDPLLNVGKLIANNTRVWVYCGNGKPSDLGGNNLPAKFLEGFVRTSNIKFQDAYNAGGGHNGVFDFPDSGTHSWEYWGAQLNAMKPDLQRALGATPNTGPAPQGATEQQWNFAGIEAAASAIQGNVTSIHSLLDEGKQSLTKLAAAWGGSGSEAYQGVQQKWDATATELNNALQNLARTISEAGQAMASTEGNVTGMFARATVGLVEAIGIRELRQHASRYLARVEAGEELGVTNKGRLVARLIPVQAAERSREALIESGVLIPARRPQNLLDVTAEPARGRKRTLSDVLNEMRDEQTTARDIMNAGVTCVGEHETLTAAAQYMREHDIGALPICGDDDRLHGMLTDRDIVIKGLAAGLDPNTATAGELARDSIYYVDANASIQEMLNVMEEHQVRRVPVISEHRLVGIVTEADIARHLPEHAIVQFVKAICSPMALASTPGLLTTAGAGRPRDRCARIVCTVFIETAVVATMFVALLGLSTISSKADDIDWDAIAQCESGGNWAANTGNGLYGGLQISQATWDSNGGVGSPAAASPQQQIEVADNIMKTQGPGAWPKCSSCSQGDAPLGSLTHILTFLAAETGGCSGSRDDMVDFGALPPEINSARMYAGPGSASLVAAAQMWDSVASDLFSAASAFQSVVWGLTVGSWIGSSAGLMVAAASPYVAWMSVTAGQAELTAAQVRVAAAAYETAYGLTVPPPVIAENRAELMILIATNLLGQNTPAIAVNEAEYGEMWAQDAAAMFGYAAATATATATLLPFEEAPEMTSAGGLLEQAAAVEEASDTAAANQLMNNVPQALQQLAQPTQGTTPSSKLGGLWKTVSPHRSPISNMVSMANNHMSMTNSGVSMTNTLSSMLKGFAPAAAAQAVQTAAQNGVRAMSSLGSSLGSSGLGGGVAANLGRAASVGSLSVPQAWAAANQAVTPAARALPLTSLTSAAERGPGQMLGGLPVGQMGARAGGGLSGVLRVPPRPYVMPHSPAAG

SEQ ID NO: 39 - DNA, 3570 bp, synthetic construct
  source 1..3570: mol_type = other DNA; note = Ag85A-ESAT6-Rv3407-Rv2626c-RpfA-RpfD fusion
atggcgttcagcagacccggcctgcccgtggagtacctgcaggtgcccagccccagcatgggccgggacatcaaagtgcagttccagagcggcggagccaacagccctgccctgtacctgctggacggcctgcgggcccaggacgacttcagcggctgggacatcaacacccccgccttcgagtggtacgaccagagcggcctgagcgtggtgatgcccgtgggcggccagagcagcttctacagcgactggtatcagcccgcctgcggcaaggccggctgccagacctacaagtgggagaccttcctgaccagcgagctgcccggctggctgcaggccaaccggcacgtgaagcccaccggcagcgccgtggtgggcctgagcatggccgccagcagcgccctgaccctggccatctaccacccccagcagttcgtgtacgccggagccatgagcggcctgctggaccccagccaggccatgggccccaccctgatcggcctggccatgggcgacgccggaggctacaaggccagcgacatgtggggccccaaggaggaccccgcctggcagcggaacgaccccctgctgaacgtgggcaagctgatcgccaacaacacccgcgtgtgggtgtactgcggcaacggcaagcccagcgacctgggcggcaacaacctgcccgccaagttcctggagggcttcgtgcggaccagcaacatcaagttccaggacgcctacaacgccggaggcggccacaacggcgtgttcgacttccccgacagcggcacccacagctgggagtactggggagcccagctgaacgccatgaagcccgacctgcagcgggccctgggcgccacccccaacaccggccctgccccccagggcgctaccgagcagcagtggaacttcgccggcatcgaagctgccgcgagcgccatccaaggcaacgtgaccagcatccacagcctgctggacgagggcaagcagagcctgaccaagctggctgctgcttggggcggatccggaagcgaagcctaccagggcgtgcagcagaagtgggacgccacagccaccgagctgaacaacgccctgcagaacctcgccagaaccatcagcgaggccggacaggctatggccagcacagagggcaatgtgaccggcatgttcgccagggccacagtgggcctggtggaggccattggcatcagggagctgaggcagcacgccagcaggtacctggccagagtggaggctggagaggagctgggcgtgaccaacaagggcaggctggtggccagactgatccccgtgcaggctgccgagaggagcagagaggccctgatcgagagcggcgtgctgatccctgccagaaggcctcagaacctgctggacgtgaccgctgagcctgccagaggcaggaagaggaccctgagcgacgtgctgaacgagatgagggacgagcagacaacagccagggacatcatgaacgccggcgtgacctgcgtgggagagcatgaaaccctcaccgccgccgcccaatacatgagggagcacgacatcggcgccctgcccatctgtggagacgacgacaggctgcacggcatgctgaccgacagggacatcgtgatcaagggcctggctgccggcctcgatcctaacaccgctacagccggcgagctggccagagacagcatctactacgtggacgccaacgccagcatccaggagatgctcaacgtgatggaggagcaccaggtgagaagggtgcctgtgatcagcgagcacaggctggtgggcatcgtgaccgaggccgatatcgctaggcacctgcccgagcacgccatcgtgcagttcgtgaaggccatctgcagccccatggctctggccagctcagggaggcatcggaaaccaactacaagcaatgtatctgttgccaagattgctttcaccggcgcagttcttggaggtggcggaattgccatggctgcccaggcaacagccgctacagatggagagtgggatcaggtggctcgatgtgagtctggtggcaactggtctatcaacactgggaacgggtatcttggcggcttgcaatttactcagagcacttgggctgcccacggagggggtgaatttgctcctagcgcgcagctggcctcccgcgagcagcagatcgctgtgggagagagggtgttggccacacagggaagaggtgcctggcctgtctgtggccgcggactcagtaatgctacccctagggaggtgctgcccgcctcagccgctatggacgctccactggatgctgccgccgtgaatggcgagccagctccgctggcacccccacctgcagaccccgctcccccagtcgagctggcggcaaacgacctgcccgcacctctcggagaaccacttcctgcagcgcctgccgatccagctccacctgctgatttggctccccccgctcccgccgatgtagcccctccggtcgagttggctgtgaatgacctgccggcacctctgggcgagcccctcccagccgctccggccgaccctgcccctcctgctgatctggcaccacccgctcctgccgacctcgccccacccgccccagcagacctggctccaccagcgcctgcggatcttgccccgcctgttgagctggctgtcaacgatcttcctgcgcctcttggagagcccctgcccgctgctccagccgaactcgcaccaccggcagatctggctcccgcctctgccgatcttgcacctcccgcaccggcggacttggcacctccagcaccagcagaactggctccccctgcgccggctgacctggcccctccagcagccgttaatgagcaaaccgcaccaggggaccagccggctacggcaccaggtggaccggtggggctggccaccgacctggagctgcctgagccggatccccaaccagctgatgctcccccacctggcgacgtaactgaggccccagctgaaacgccccaggtcagtaacatcgcttacacaaagaaactgtggcaggcaattagggctcaggacgtgtgtgggaacgacgccctggacagcttggcccaaccgtacgtgatcggtacccccggactcctcaccacagctggagctggcaggcccagagacagatgcgccaggatcgtgtgcaccgtgttcatcgagaccgccgtggtggctaccatgttcgtggccctgctgggcctgagcaccatcagcagcaaggccgacgacatcgactgggacgccatcgcccagtgtgaatccggcggaaactgggccgccaataccggcaatggcctgtacggcggcctgcagatcagccaggctacctgggactccaacggaggagtgggaagccctgccgctgcttcccctcagcagcagatcgaggtggccgacaacatcatgaagacccaaggccctggcgcctggcctaagtgttccagctgtagccagggcgatgctcctctgggcagcctgacccacatcctgacctttctcgccgccgagacaggcggatgtagcggaagcagggacgac

SEQ ID NO: 40 - protein, 9 aa, synthetic construct
  source 1..9: note = HA tag
YPYDVPDYA

SEQ ID NO: 41 - DNA, 4521 bp, synthetic construct
  source 1..4521: mol_type = other DNA; note = Ag85A-ESAT-6-Rv3407-Rv2626c-M72 fusion 2-RpfD fusion
atggcgttcagcagacccggcctgcccgtggagtacctgcaggtgcccagccccagcatgggccgggacatcaaagtgcagttccagagcggcggagccaacagccctgccctgtacctgctggacggcctgcgggcccaggacgacttcagcggctgggacatcaacacccccgccttcgagtggtacgaccagagcggcctgagcgtggtgatgcccgtgggcggccagagcagcttctacagcgactggtatcagcccgcctgcggcaaggccggctgccagacctacaagtgggagaccttcctgaccagcgagctgcccggctggctgcaggccaaccggcacgtgaagcccaccggcagcgccgtggtgggcctgagcatggccgccagcagcgccctgaccctggccatctaccacccccagcagttcgtgtacgccggagccatgagcggcctgctggaccccagccaggccatgggccccaccctgatcggcctggccatgggcgacgccggaggctacaaggccagcgacatgtggggccccaaggaggaccccgcctggcagcggaacgaccccctgctgaacgtgggcaagctgatcgccaacaacacccgcgtgtgggtgtactgcggcaacggcaagcccagcgacctgggcggcaacaacctgcccgccaagttcctggagggcttcgtgcggaccagcaacatcaagttccaggacgcctacaacgccggaggcggccacaacggcgtgttcgacttccccgacagcggcacccacagctgggagtactggggagcccagctgaacgccatgaagcccgacctgcagcgggccctgggcgccacccccaacaccggccctgccccccagggcgctaccgagcagcagtggaacttcgccggcatcgaagctgccgcgagcgccatccaaggcaacgtgaccagcatccacagcctgctggacgagggcaagcagagcctgaccaagctggctgctgcttggggcggatccggaagcgaagcctaccagggcgtgcagcagaagtgggacgccacagccaccgagctgaacaacgccctgcagaacctcgccagaaccatcagcgaggccggacaggctatggccagcacagagggcaatgtgaccggcatgttcgccagggccacagtgggcctggtggaggccattggcatcagggagctgaggcagcacgccagcaggtacctggccagagtggaggctggagaggagctgggcgtgaccaacaagggcaggctggtggccagactgatccccgtgcaggctgccgagaggagcagagaggccctgatcgagagcggcgtgctgatccctgccagaaggcctcagaacctgctggacgtgaccgctgagcctgccagaggcaggaagaggaccctgagcgacgtgctgaacgagatgagggacgagcagacaacagccagggacatcatgaacgccggcgtgacctgcgtgggagagcatgaaaccctcaccgccgccgcccaatacatgagggagcacgacatcggcgccctgcccatctgtggagacgacgacaggctgcacggcatgctgaccgacagggacatcgtgatcaagggcctggctgccggcctcgatcctaacaccgctacagccggcgagctggccagagacagcatctactacgtggacgccaacgccagcatccaggagatgctcaacgtgatggaggagcaccaggtgagaagggtgcctgtgatcagcgagcacaggctggtgggcatcgtgaccgaggccgatatcgctaggcacctgcccgagcacgccatcgtgcagttcgtgaaggccatctgcagccccatggctctggccagcaccgccgcttccgataacttccagctgagccagggcggccagggattcgccatccccatcggccaggctatggccatcgccggccagatcagaagcggcggaggaagccccacagtgcacatcggccctaccgccttcctgggcttgggcgtggtggacaacaacggcaacggcgccagagttcagagggtggtgggcagcgcgcccgccgctagcctcgggatcagcaccggcgacgtgatcaccgctgtcgacggcgccccgatcaacagcgccacagccatggccgacgccctcaacggccaccaccctggcgatgtgattagcgtgacatggcagacaaagagcggcgggaccagaacaggcaatgtgacactggccgagggccctcctgctgaattcatggtcgacttcggcgccctgcctccagagatcaacagcgcaagaatgtacgccgggcctggatcagctagcctggtggccgccgctcagatgtgggacagcgtggcctctgacctgttcagcgccgcctccgcttttcagagcgtggtgtggggcctgacagttggatcttggatcggctcttcagccggcctgatggtggccgccgcctccccctacgtggcctggatgtctgtgaccgccggccaggcagaactgaccgctgcacaggtgcgggtggccgctgccgcctacgagacagcttacggcctgaccgtgcccccccctgtgatcgccgagaaccgggccgagctgatgatcctgatcgccacaaacctgctgggccagaacacccctgccatcgccgttaacgaggccgagtacggagaaatgtgggcccaagatgccgccgctatgttcggctacgccgccgccaccgccaccgctaccgccacactgctgccgttcgaggaagcccctgagatgacctccgctggcggcctgctggaacaggccgctgctgtcgaggaagccagcgataccgctgccgctaaccagcttatgaacaacgtgccacaagctctccagcagctggctcaacctacccagggcacaaccccttctagcaagctgggcggcctgtggaagaccgtgtccccacatcggagccccatcagcaatatggtcagcatggccaacaatcacatgagcatgacaaacagcggagtgtccatgaccaacacgctaagcagcatgctgaaaggcttcgcccctgctgccgctgcccaggccgtccaaacagccgcccaaaatggggtgcgggccatgagcagcctgggctctagcctgggctccagtggactgggcggcggcgttgccgccaatctgggcagagccgccagcgtgggctctctgagcgtgcctcaggcttgggccgccgctaatcaggctgtgacccctgcagccagagccctgccactgacaagcctgacaagcgccgccgagagaggccctgggcagatgctgggaggtctgcctgtgggccagatgggcgcccgggccggaggcgggctgagcggcgtgctgagagtgccccccagaccttatgtcatgcctcacagccccgccgccggagatatcgcccctcccgccctgtctcaggaccggttcgctgatttccccgccctgcctctggaccccagcgccatggtggcccaggtgggccctcaggtggttaatatcaacaccaagctgggctacaacaacgccgtgggcgccggaaccggcatcgtgatcgaccccaacggcgtggtgctgaccaacaaccacgtgatcgccggcgccacagacatcaatgcctttagcgtgggatctggccagacctacggcgtggacgtggtgggttacgacagaacccaggacgtggccgtgctgcagctgcgaggcgcgggcggactgcctagtgcagcgattggcggaggtgtggctgtgggcgagcctgtggtggctatgggcaacagcggcggccagggtggcacccctagagcagttcctggcagagtggtggccctgggacaaacagtgcaggctagcgactctctgaccggcgccgaagaaaccctgaacggcctgatccaatttgatgccgccatccagcctggcgatgccggcggccctgtggtcaacggcctgggccaggtcgtgggaatgaacaccgccgctagcacccccggactcctcaccacagctggagctggcaggcccagagacagatgcgccaggatcgtgtgcaccgtgttcatcgagaccgccgtggtggctaccatgttcgtggccctgctgggcctgagcaccatcagcagcaaggccgacgacatcgactgggacgccatcgcccagtgtgaatccggcggaaactgggccgccaataccggcaatggcctgtacggcggcctgcagatcagccaggctacctgggactccaacggaggagtgggaagccctgccgctgcttcccctcagcagcagatcgaggtggccgacaacatcatgaagacccaaggccctggcgcctggcctaagtgttccagctgtagccagggcgatgctcctctgggcagcctgacccacatcctgacctttctcgccgccgagacaggcggatgtagcggaagcagggacgactga

SEQ ID NO: 42 - protein, 1506 aa, synthetic construct
  source 1..1506: note = Ag85A-ESAT-6-Rv3407-Rv2626c-M72 fusion 2-RpfD fusion
MAFSRPGLPVEYLQVPSPSMGRDIKVQFQSGGANSPALYLLDGLRAQDDFSGWDINTPAFEWYDQSGLSVVMPVGGQSSFYSDWYQPACGKAGCQTYKWETFLTSELPGWLQANRHVKPTGSAVVGLSMAASSALTLAIYHPQQFVYAGAMSGLLDPSQAMGPTLIGLAMGDAGGYKASDMWGPKEDPAWQRNDPLLNVGKLIANNTRVWVYCGNGKPSDLGGNNLPAKFLEGFVRTSNIKFQDAYNAGGGHNGVFDFPDSGTHSWEYWGAQLNAMKPDLQRALGATPNTGPAPQGATEQQWNFAGIEAAASAIQGNVTSIHSLLDEGKQSLTKLAAAWGGSGSEAYQGVQQKWDATATELNNALQNLARTISEAGQAMASTEGNVTGMFARATVGLVEAIGIRELRQHASRYLARVEAGEELGVTNKGRLVARLIPVQAAERSREALIESGVLIPARRPQNLLDVTAEPARGRKRTLSDVLNEMRDEQTTARDIMNAGVTCVGEHETLTAAAQYMREHDIGALPICGDDDRLHGMLTDRDIVIKGLAAGLDPNTATAGELARDSIYYVDANASIQEMLNVMEEHQVRRVPVISEHRLVGIVTEADIARHLPEHAIVQFVKAICSPMALASTAASDNFQLSQGGQGFAIPIGQAMAIAGQIRSGGGSPTVHIGPTAFLGLGVVDNNGNGARVQRVVGSAPAASLGISTGDVITAVDGAPINSATAMADALNGHHPGDVISVTWQTKSGGTRTGNVTLAEGPPAEFMVDFGALPPEINSARMYAGPGSASLVAAAQMWDSVASDLFSAASAFQSVVWGLTVGSWIGSSAGLMVAAASPYVAWMSVTAGQAELTAAQVRVAAAAYETAYGLTVPPPVIAENRAELMILIATNLLGQNTPAIAVNEAEYGEMWAQDAAAMFGYAAATATATATLLPFEEAPEMTSAGGLLEQAAAVEEASDTAAANQLMNNVPQALQQLAQPTQGTTPSSKLGGLWKTVSPHRSPISNMVSMANNHMSMTNSGVSMTNTLSSMLKGFAPAAAAQAVQTAAQNGVRAMSSLGSSLGSSGLGGGVAANLGRAASVGSLSVPQAWAAANQAVTPAARALPLTSLTSAAERGPGQMLGGLPVGQMGARAGGGLSGVLRVPPRPYVMPHSPAAGDIAPPALSQDRFADFPALPLDPSAMVAQVGPQVVNINTKLGYNNAVGAGTGIVIDPNGVVLTNNHVIAGATDINAFSVGSGQTYGVDVVGYDRTQDVAVLQLRGAGGLPSAAIGGGVAVGEPVVAMGNSGGQGGTPRAVPGRVVALGQTVQASDSLTGAEETLNGLIQFDAAIQPGDAGGPVVNGLGQVVGMNTAASTPGLLTTAGAGRPRDRCARIVCTVFIETAVVATMFVALLGLSTISSKADDIDWDAIAQCESGGNWAANTGNGLYGGLQISQATWDSNGGVGSPAAASPQQQIEVADNIMKTQGPGAWPKCSSCSQGDAPLGSLTHILTFLAAETGGCSGSRDD

SEQ ID NO: 43 - DNA, 234331 bp, synthetic construct
  source 1..234331: mol_type = other DNA; note = Vector 4 precursor
swccattccgggccgtgtgctgggtccccgaggggcgggggggtgttttcatcgggggggtgaaatgtgggaatttgggaagttggcggtggcgggggacggcgacggcgaataaaagcgccgtgcggcgcgcacggcgaaacccagacgcgcgtgtgtcttgcgtctctttcagtcgcgcgtctgtcttgcgtgtctttgagtccccggggaaaagaggaagcggtcccgaggggacggcggcgcgactccctggggacgcgaagatcggacgcggaaaagaggaagtccccggggacggccacaggcggaaaaaaaaaacgaggaagccgcagcccagtctgccgggaccggcaggcaggcgcacagacccgcgtcgaggacacacgcagaagaagcgcccgcgccggggcggggggggggatcgcgggccccggggcacactgcttccatctggccgcgcgcacaccccgccgacacacccctgacacacccgcgacacacccggcacacgcccgcgacacacccggcacgcgcccgccacacagccagccgacacacccgcgacacacccgccacacccagccgcacccggcacacacccacccagccgcacccccgccacacccagaccgacgccggtgcgggaccgggctgaggggggtgtaagcgccttgacgcgcggcgctatggcactgcgtgccacggtattggttggcgggacgaggctgaggggggtttgcgggacgtaagcgcgacgccgagtttgcggcgtgctgtggcgcgctcaaggctagggacgggggccgcgcgtagcttttcggcggcgacggggaacaaaacaggcacgcacacgcagctcgcttcagcggtcgccctatcggcaccgccgctattctttattaacgtcgttctccccccgcttctacacgcggaccgctgcagacggctatgctcagactgtttctcttgacggcgacatgtgtttgcgtctgtgcggcgcggcgacggccgcaagcggacgacgccgcctgccaccacacgtggcccacgcgctgcgccggcccgcgtcccgcgccgtcggctcacaacacggcgctttcttcctcgcacgccatctccatcgcacaccgtgtgctgcattcgccgtcgcctccacgagagaacatccgccacagcatgcgctgtcgccgtcgcgccatggcctcctcggcttgcacacccgtttcgcacacccagcctcgggccgccaaccacagccgttcgaggatgacgtacgcgacgagcgagcccaccaattctcccacggcctcgcccgccaagtcagacggtggtgttgcctgcggcggggacgggggttgcgctgggatcgggggtggcgccggggacggggggctttcgcagcggggaacacacaccgcctatttaacctccacccgctacaacacacacatgccgcacaatcatgccagccacagacacaaacagcacccacaccacgccgcttcacccagaggaccaacacacgttacccgtacaccacagtaacacacaaccgcaagtccaaacctcggacaaacgcgccgccgaagaccaccgcacgcagatggagctcgacgccgcggactacgctgcttgctcacaggcccgccaacacctctacggtcaaacacaaccccaactacacgcataccccaacgccaacccacaggaaagcgctcattttttcacagagaatcaacatcaagtcacgcatctacttcacaacattggcgagggcgcagcgctcggctaccccgtcccccgcgcggaaatccgccgtggcggtggcgactgggccgacagcgcaagcgacttcgacgccgactgctggtgcatgtggggacgcttcggaaccatgggccgccaacctgtcgtgaccttactgttggcgcgccaacgcgacggcctcgctgactggaacgtcgtacgctgccgcggcacaggctttcgcgcacacgattccgaggacggcgtctctgtctggcgtcagcacctggtttttttactcggaggccacggccgccgtgtacagttagaacgtccatccgcgggagaagcccaagctcgaggcctattgccacgcatccggatcacccccctctccacatctccacgcccaaaaccaccccagcccaccacatccaccgcctcgcacccacatgctacggctcggccagatcacacgctctttcctgtcccttccacaccctcaaccacggttcacaatccccgaaactacgccgtccaacttcacgccgaaacgacccgcacatggcgctgggcacgacgcggtgaacgtggcgcgtggatgccggccgagacatttacgtgtcccaaggataaacgtccctggtagacggggtagggggatctaccagcccagggctcgcgtatttcgccgccacgctgcttcaccgatatccaataaacccatcccctcgccacgacgtctccgcgtatctttgtagcctcaggaatccgtccccacgtccacccatcccgagcactccacacgctataacagaccacggacacggcaaatgcatgcaaacttctcatttattgtgtctactactctgtgttgctacagggggtgaaggcaaagaaaaaaaaaaggaacaaaataatagattagcagaaggaataatccgtgcgaccgagcttgtgcttcttttcttataaggaggcaaatatactagggaaaacataagaataggaagaaaccgaggtttgggagaaaagctgagataaaatagcgcattttccatacagaggttgttgtttttgtggatcctaagaggtttcaagtgcgaatcttaaagttctcacgagaatattgtcttcaagaatcgacaactgtggtccaagatttttttttggtctttttaggttctgcgagggacatcacgatggatcgttgcgatgaagtcacgcgtacgcctctggtgtggcgcggtgtcgtgacaggagagtgtgttttcagtgcagagctgtcttgattcctatatccgagtatctgttttctcgtaaggacggtaatcttctttggtgtaagtacatctaaaagctgcaaactatattttaagggctgtctctaggtgtactttgatgctggagtttttcgctgtgttgatgtgaataaatctactactactattatatgcagaaagagtgattatgccgagacaagattgcattggctgaactgtttcaaaaacgcctacactctacttatccgtaaacctaaggtaatactatgtgtaagttgttttttttttctttttgtagtaaaatggtgatacgtgcaattaaaactgtattccatgtttccatcctttcatttcaactttaaaggcggctttgagagcgaagaagtgcgaggataaaaatggatgactccttcgtgtccagggagtcgactactgcaacgctgattgattaaaagatggtctccgatgatgatgttgttattgatcgaatcatggtgcagaacggcgacggagaggagcgtgtccgccgccgggaaggtggtctctttctcttttcttttttcaagaaatcttccatgtgtttatcgtagtgatcgaaatcgactgatctcgggttctttttgttggtttcttttcggttaatcatgtattgttttctttttttacagaaagatacttttttcatgagcaattcctcgcccggcgccggcatgccgaggtggggccactgcgatcagcggcatgccgacgccgacccggggatcttggattcaccgttttctctcttctctctctacatacagaccgggtggcaggagcggtaaggaatcatcgtcgtctttcattcttcgatgattatggtaatactaaatcttatctaggagcatatacatctaagattggagtactagtagtcgtttgtggtttctatttttttttatatttatctatgacagtttttctgtttttcgttttgataataatataataaaaactcatggacgtgaaatctggcttggttgtggtgatttcattctcattattgttgttttctttccgtcttgcggatgaagatgttgcgatgcggttgttgttggtgttgctatacaccgagagagatgatctttttgttcttctggttcatttcctatgattgtttggctgctgaccgacgcgtcaggatgtgcagggcatgcggggaatcaggaccggacacgggataatttcatctacctatacggagatcgcggtcctcgccatgaggatcgcgacaggcgcgtcgagggggcaggaacacccttgcggattgacattcttggtggtgtttcgttgttgtcggtagttgttgttgacgatgaggataaataaaaatgaccttgtttttgttctgttttctcttgttgggaatcgtcgactttgaattcttcgagttatcggaaagctgaggtacccaaatgtctgtagcttttttctttttaccctcttgtttatcatctgcgattcgtggtaggtaggagagggaaatgataatccgagattaaggaaaggagaagataaaataaaaaaaaaataaaacagaagccgaccggccgccgacccgttccccaggaccagcctacgaggaacggataacgcggtggcgacggcagcggtggtggcgctgggggtggcggtagtggtactgctgatggtagtcgggacggaggagagacgatgcatacatacacgcgtgcatgctgcatgggtggatggtccgaccgggagacgcggaagagaaactcacataaaaaggtgacaaaaagagcggttgaaaaaagaaaacgagattcgaccagacagaagaggaggaccggggcttggcgacccttccacgactgctgttgtcatctcggctcctccgtcttctcccggccacgggcggctaagtcaccgccgttctccccatccgtccgagcgccgaccgaccagccggccgattcgcccgccggggcttctggagaacgccggggcagcagcgatctggagaagccgctaaacccctgcgtttttatatggtagctctgccgagcgcgggctgacgcgttaagtaagcggaaagacgtgtgtgacgaaaaggggtcccatggtatttcacgtgacgatgaggagatgcggtttggagcacatacggtttagaaaaagggagttgtcgtgacaagggctgagggacctctgtctccatgtgtgtataaaaagcaaggcacgttcataatgtaaaaaagaacacgttgtaaacaagctattgctgtatcattcggctgactatgcttcattcggactgattttcttttcctaacggcgtaacttaaagtgattaacgtatgatatttgttccccagagttatactatagtcatcatcctaaaattcagatataaatgaacacatgtcgtatgagattattaagaaaccgaaaccacccatagttcaccatcctcttcatcattcagccgatgacccactccgtacaacgactcagtctgcttcgtcatattgcaaagcacaagcgacgtatgtgaacaacttgaaacacagactgtgttattaatgaccgttgtaccattactagtcacattgcataaagatcctccgccgtcgtcccatcttttccactcggtggaaaaccggtcgctatcatcaactatggtgagattttcaccctgcgtggtattcagtttcttcatattcataccttggattccattattaaaccccaatattaagcacgttattagtaccccccccccccaccaaggaatgtgactggaccggttcctagcagctctgggagccatgttcaggttgaaccacagctacagcgaaaccgagtccagtgaccggtaaccacgtccagcccctgcgtatgtaccagtccaagcacgtccggtcattgttctacacaggaaatctaactaggtcaacgtaattttattccaccgttacgcagaatactaacaaaaaactacacaaatgtaacggattacacataatttattacgtgaaaactgtaagaaagccaattcaccaagcgatacatttatttgacttccaagtgccacacatcaccactatattcatccatgttttcaccgaaccaacgagacagatcgaagaagccagaatcttccgactttaaattacataaatccaacgtattatgaccacagctcgacacacaaatagttgcgttactattcacagtggcattacctatacccgtaacgttgcacaaccactgatcaccattgtcaccaaaaacggttttccacttagttgtcaacggatctttcctatgcgtaatggtaaaattactaccagtcgtcgcttttagctcattacgagtattatccgcatccacatatatcaacgtcatagctaggcacgctataagtaccccccccccacaatggaatgttgccaaaccggttctttcccgttatagccatagcgttcccaggcaaaagcaaacgccgaacctaatgcagtaaaaagcgcttgcagccagaaccagcttatgtaccagccacgataacatccggtcactgtttccacaggaaaccctaccagggtagagccccgcttgttttttcctgtctatcttgtttagcaactcgtaaactgtcagtctagccacgtccgtttagatcaaaagtcacgtatactgcgacgttgtttccacccgtttccccgtcccgccgtttccgaacaacccacccgggttcagacaaccgaccaccaacagaaatatacacacagaccaccgggagttcagttaaagatttcatcaggtttattttggctgctgctagtcttttgcttcttagaaaaaaaatacccatatagagaaataatgatagtttgacaacacatatggcagggatttcttcttcatcaataagatatgcaattcccccagggagagactttcaacaattgaatttacaaaaacaaaattacatcaggagaaagagaggatacattaataaatatattatatctggtgtatatactgaatgctgctggttcataaggtaacgatgctactttttttaattccaagatggtttttctttgttagtcttttgttgacttgctggttcctaaaagttctcaaaaacgattgtgtgaagattttatgacgttggttgactagttcatgagattctgctgtacgtgtgatggttattcgctggttcgttctaagatgagtatcgtactgtgtctgcgatggtcgtctcttactggcattctctcggctgcctcttgctttcatgattgaaaaggaaaaaaggactccgagggcgcggtcatcttttacttttcggttttttcgttggcgggtcagaggtagtcagatcatgagactgtcgtggtcgatgaaactgtgtctgctcaagtgacgtccatttcttgtacggagaaaaaagtcatcgggataaataaggctatacaaggcgttgtcaagcgtgcggctctaaacaaattaagcgatacaaaattacagtaatacgaataataagttaccccctccccctgtggtccccccgagacgagagccacccatcgtgtactctcgcaccacccacgaccacagagggagacgggacgaagagacgacgcagagcgccatctccttctggaggccggcggcgttaactgctacagctgcggcggcgacaacagctgcgatttgtcggccgacatgccgatggtatgggcggcggcggcagtggccgcggcagcggggaggagaggagagagaagaggagcggggcgtccgaaggcgaggatggcatggtctcgccggagcgcccggcttttatggaacgctcgcgtccggtcgggcagcgcccacaggaagatgagtcaaaacttttaaaccatcctgagacccgagtagcggtttacaggccgcacgccagtcttagctaaaaacagcggacagtcccacgctgtttctgttgtggctctctccagtttcctcatcgccgtcccgatctccgtcgtcatcggaagaataccacccgctctcatgcggcagtcgatcgacctcgacgaacgagacgcggcgacgcctctctacggccgactggttgtggtggtgaaagaagagcaccagcaatcccaggaggagcaacaagccctcacatgtccaggaggtcggggagagggcctgtcggagatggccgtgaggcatcacgtacggcagctgaggagaaacggagaagaaaggaaaattaccgtcaggggccggggttcttattagagaaacagcacgtaggtcaggatccagatgctaatggcaatcatgatgacgatgatcatgcaggccaagacgcggcgcaccaatgccgaatccaatagccgccgtgcctccggttggtggccggcggcatctagagacatgatttgggggggaccggcggcgcgaaaagacagggagatggacagtgtcacggtgttttgttatgattaggacatggggaccggaagccgagacagagtactacagggtgttgaagggtaacgtgagggagatcatgtcatgggcgggctgaagaccgtgcggggaggattggcgtgtgcggtgcttgtggaacacggtgttttaatatgtatccgcgtgtaatgcacgcggtgtgctttttagcactcggcttgataagctacgtggccgtttgcgccgaaaacacggttaccaccaactgtctcgtgaaaacagaaaatacccacctaacatgtaagtgcaatccgaatagcacatctaccaatggcagcaagtgccacgcgatgtgcaaatgccgggtcacagaacccattaccatgctaggcgcatactcggcctggggcgcgggctcgttcgtggccacgctgatagtcctgctggtggtcttcttcgtaatttacgcgcgcgaggaggagaaaaacaacacgggcaccgaggtagatcaatgtctggcctatcggagcctgacacgcaaaaagctggaacaacacgcggctaaaaagcagaacatctacgaacggattccataccggccctccagacagaacgacaactccccgttgatcgaaccgacgggcacagacgacgaagaggacgaggacgacgacgtctgataaggaaggcgagaacgtgttttgcaccatgcagacctacagcacccccctcacgcttgtcatagtcacgtcgctgtttttgttcacaactcagggaaatttatcgaacgccgtcgaaccaaccaaaaaacccctaaagctcgccaactaccgtgccacctgcgaggaccgtacacgcacgctggttaccaggcttaacactagtcatcacagcgtagtctggcaacgttatgatatctacagcagatacatgcgtcgtatgccgccactttgcatcattacagacgcctataaagaaaccacgcatcagggtggcgcaactttcacgtgcacgcgccaaaatctcacgctgtacaatcttacgattaaagatacgggagtctatcttctacaggatcagtgtaccggcgatgtcgaggctttctacctcatcatccacccacgtagcttctgccgagctttggaaacgcgtcgatgcttttatccgggaccagggagagttgtggttacggattcccaagaggcagaccgagcaattatctcggatttaaaacgccagtggtccggcctctcactccattgcgcctgggtttcgggactgatgatctttgttggcgcactggtcatctgcttcctgcgatcacaacgaatcggggaacaggacgctgaacagctgcggacggacctggatacggaacctttgttgttgacggtggacggagatttggaataaaagatgcgcgtcaaccgtcaaagacgcaacaaccttacgtaccgacaaacggtatatgtaattctgaccttctacattgtacataggggcatatgtaacagcaccgataccaacaattctacatctacttcaaatagcaccgtctctgatactaatgtatattctactccaaatcctcccagtgtatcttctacaactcttgatacatctaccgactcacagatatcaatcgcctcaaacaccatatccagcactacaaatacattgaccgcatattctataactacgttaaacacctcgacttcatcttcaactcttactgctgtctctagtacccatacaagatcctcaatactctccaacaacgcatcatacaccacatcattggataatacaactacagacataacgtccagcgaaagttcaatcaacgtgtcgacagtttacaacaccacgtacattcctgtaacatcgcttgctattaattgtactgctacaattaacggaacaaataattctagttcaaaaacttgccaacaagacattgaaacaatacctgtgaaatcaactccactaacggcagaagaaggaacaaatattacaatacatggcaatgacacgtgggattgtcccgacgtggtttggtatcgacattataattggtctacacatggacaccacatttatcccaatacacattacaaaactttgatacatcgacgcaagatcctaacgtcacatcctatatgttattctgatcgctcatcacctaccgcgtatcatgatctatgccgttcatgtaataaaacagaactacgcctttacgatttaaacaccaccaattctggtagatatagccgacggtgttacaaacagtaccatcaccagggaccacacgaggatgaaaatttcggactaactgtaaatcccaggaacaacactgacaattataccatcccagtatgtcccagatacgtagaaacacaatcacaggaagatgaacaagacgacgattatacactaagcactaccataaataataatcttatgcgcaaaacaggtcactatgacatctcacatggcacgcacactacatgggctcttatactaatttgcatagcctgcatgcttcttttttttgttcgacgagccctcaataaaaaatatcgtccactacgagatgatattagtgaatctagccttgttgtgcaatatcatcctgaacatgaagactaacgtttccggacatgcaacacataaaattaagtaacatatctaccatgaagtacagcaaatatctactaatgtctatccatccaacagtgataccatgcactggcatcttgcgattacatggacggtaatcatatccacgttttcggaatgttgtaaccaaacttgtccgtgttcctgcgtttgtgtcaattctacaacagtcaacatatccacaaatgaaacaacgtctaaagccatcactccaactgctacgacaaataccgcaaaaacaacgtcaagccttgttattactacaccgtcatcagtaacgattagcaaagccgtgtctactgcagcttcatcaaccatactatctcaaaccaatcgcagtcatacaagtaatgtcatcacaaccccaaaaacgcggtttgaatataatatcacgggatatgttggccaagaagtgactttcaacttcagtggatcattttggagctacattgaatggttccggtacagttctccaggctggctttattcctcggaaccaatatgcaccgttaccaacagttatcatcatactttccctcgtggtaccttatgtttcgattgtaacatgacaaaatttgttatttacgatctaacgttaaacgattctggaaagtacgttgtcaagagaacacgtcatgacaatcaatacgaagaagcatgctacaatctcacggtaatttatgccaacacgacagccatagttaccaacaggacgtgtgatagaagacaaacaaaaaatacagacactactaaccatggaatcgggaaacatattattgaaactattaaaaaagccaacattcccctggggattcatgctgtgtgggcgggcatagtggtatcagtggcactcatagcactatatatgggtaaccgtcgtaggcccaggaaaccgcgttataccagacttcctaaatacgacccggatgagttttggactaaaacctgatatgcacatcaataaacttttttgtatctttagttattaatgtctgtgtgtttattcagaataactcatttataatataagacggaatattcatatacattaaaaacatgggtgtacaatataacactaaactgttattagccgtattagcaattatcccagctggcattctagtacaggcaatttcacatgagcaaaaaacatcctaccggcaacttttgctgcaaagtgaacgtgtgcaaatacccatcacaacagtcgagggagatacaatttgctttaacgttagtaacaacccctgcaacttttccagttattggaatcacaataattgtgaactttgcggttggacaccgtttttctttgaatatgctggatatactgaaaacacgtcgtgtcacccacgatttacctgtattcatgatactaaaggtctaaaactatacaatgtaaccatgaatgactcgggaatttatacacaacacgtttatcactgtgatattccatgtaacatcagcgatgatcgtaaatataacgtagatgacattgataactgcaacgctactataaatgtaaccgactatattattaccgtgttgtcttcacgttattctaaacgcaccgattaccacgtagatacttacattggttatgcaaccactgtggtgacaatagtatttatctgtgttttaacttgcattaacgtctcagcaactctaaggcacagactacgaactagaaacaacgttaacagcataacgtgattacaaagtatcaacgctagtttatccaagagaaactttcatgaaggatcgcaataaagcattgctatgtatcatctttattttaatcatgtacctcatttatatttattttaaacgtcgttgtattcctactccgtccccagacaaagcggatctgcgagtggaatttccctcattacccccgtgtgtcggcatacagtgcgctgcataagaacacgcatgacacatagcgtacctctggacggtacagtatatgataacatgattcaaggaaagtatggattcctaccgacatgttatgacagaacacacaggttttctgcgtgttttataaaagagcgtctcgaagcagcttgagccacactacggtccagataacgagcgttgcaaaaaatatgccgcgcagtagtcgaaagccgtactgagcgtgcgaagcgggtagggtgccgaacgacggatatgcgccgttgtcatcttcgactataaggatcgcgaccgagtcttcgggcatggtaaaagccacacggtgtggttgatatgtagcgtatccggtttggaatcgttcggctccggctcaggggatagtgaggaattctcaggggacgatatgggacccaatgactggataaaagaagggtttttcccagtaagatgatccccgtatcacatgaggtctggatatatataaatgaggagtgaaataggcaaagggtatcagacaccagcctcgtcatgcagccgttggttctctcagcggaggaactatcgtctctgctaatttgcaaatacatcccaccttaagcgacgagtccataaagcaccgttgtccgggtacggtgaaagtgacccggattgtagcacgtcccttttttgtttttgcatcgtttatcgtcaccactagtgcaatattttgatcgtaaggctgaaagagtattgttatgatgcttagaacgtggagattattacagatggtactgcttgccacgtactgttattatgtttttgcgaattgttcaatcagcacgacgactgctcctgtggaatggaagtctcccaaccgtcagattcccaagaatattacctgcgctaattactcagggaccgtcggcggtaacgttacttttcagggtctcaagaataaaacggaagactttttatcttggctactcgggtctggctataagtccatttgctcgttcttcccacaactccctggtgattctaatgagcagcattacagatatgaagtaaccaacctcacgtacaattgtacctatgaccgcctaacgttactgaatctgacaatggaaaacagcaggaattactatttcagaagagaagatgcgaattccaccttctactactcttgttacaatctgaccgtgtcctagagaacgcacgtgaagttccacagagccgcgtggctgtagctattgtttacgttgcttttgaaatgttaagcgtccctacggcgctaacatgtttctaggctactctgactgtgtagatcccggctttgctgtatatcgtgtatctagatcacgcttgaagctcgtgttgtcttttgtgtggttggtcggtttgcgtctccatgattgtgccacgttcgaatcctgctgttacgacatcaccgaggcggagagtaacaaggctatatcaagggacgaagcagtattcacctccagcgtgagcacccgcacaccgtccctggcgatcgcgccgcctcctgaccgatcgatgctgttatcacgggaggaagaactcgttccgtggagtcgtctcatcatcactaagcagttctacggaggcctgattttccacaccacctgggttaccggcttcgttttgctaggactcttgacgcttttcgccagcctgtttcgtgtgccgcaatccatctgtcgtttctgcatagaccgtctccgggacatcgcccgtcctttgaaataccgctatcaacgtctcgtcgccaccgtgtagctagttagccagctgtgtatagtttgttgtgttttgcttttgcgtatttgttttcagtcagagagtctgaaacggggtgggagggacttttgcgggtaatgcatgctaaaataaacgggtgggctggggtgtgcttggtaactcactgtttgaatacgcgctcacgcacatatgtagcactcaacatgttagcttttgcccgcacgccccggggcgtgccgagctgcctttttaataaagtctgggtttccagatacgcgctggttctgattttgatgatttgtgcctctgaaagctctacgagctgggccgtgacatccaatcgactgcctaactgtagcacggtaactacaacagcgggtcaagacgctgaattgcacggtccggcaccgttaagctgtaatgtgacccagtggggacgttacgagaatgaaagcacacccgtattatggtgcactttatggggatcacgcatgcgagtctcattaggacaccgtgtagcgtttggctgttcttggaaaacattttttatttataacgtttctgaaagtagcggtggcacttactatcaaaaaggttacaactgcaccgacaaacatataacactatcttgtttcaacctaacggtggttcctcgagcggttcaaagcacaaccaccgtaatgacacccacggtggttacaaactccacattcagtgtgtcacttattgcgttgagactgacgacaaattccagcgcggttggacacgctagttatcaacgacaacagcgtgttgaaaacgggacgttatccaagaacataactaacttggcattcacctatggcagctggggcgttgcgatgctgctgtttgccgccgtgatggtgctcgttgatttgggtttgcctcaatcggcttggcgacgctggcaaagccacgtggacgatgaagaacgtggtttgttaatataggaagtaaaaggcactgttttagcatgactgtttccaaaccgtaacgtggtaaataaatcatggcttccgacgtgggttctcatcctctgacagttacacgattccgctgcagagtgcatcatgtgtacaataaactgttgattttagctttgtttgcccccgtgattctggaatccgtcatctacgtgtccgggccacagggagggaacgttaccctgatatccaacttcacttcaaacatcagcgtacggtggtttcgctgggacggcaacgatagccatctcatttgcttttacaaacgtggagagggtctttctacgccctatgtgggtttaagcttaagttgtgcggctaaccagatcaccatcttcaacctcacgttaaacgactccggtcgttacggagcagaaggttttacgagaagcggcgaaaatgaaacgtttctgtggtataatttgaccgtgaaacccaaacctttggaaactactccagctagtaacgtaacaaccatcgtcacgacgacatcgacggtgaccggcgcgaaaagtaacgttacggggaacgccagtttagcaccacaactacgtgccgtcgctggattctccaatcagacgcctttggaaaacaacacgcacatggccttggtaggtgttgtcgtgtttctagccctaatagttgtttgtattatggggtggtggaagttgttgtgtagtaaaccagagttatagtaatgtgttttttatcagggagaaggttttgtaccaacaatgactacatcggggctatctgtgtcggaaaattatgacggaaattatggactcacggaaaccgccaatacaacgcgtacaaatagcagtgactgggtaacgttaggaaccagtacgccactgttgggaagcacggagactgcgatcaatttcggcaacgcaactacggttattccacaacctgtggaacacccggctggagaagtacagtaccaaagaacgacaacgcattactcttggatgctgattatcgttatcattttcatcatttttattatcatctgtctacgagcacctcgaaaagtttatgatcgttggaaagacagcagagagtacggacaagtgtttatgacggatacagaactgtaatatactatgatgtctaagaagtgtttgcggttatttccatggatgacaattttgttttgcataccaaaagcacaacattggaactatatgacaataccatgcgttcttaaaattggacgcggcggtcaaaatatgagtttgcctccccttaacaattcattgtacggaaacgatatttttcaatggtatacagacagaccgacagtcaccaacacgttatgtctttatcaaaacaatgagtactacacacaatccaatgaagatatttcaaacatcaaatggcaatgtacaaaaaaccatacgttaattcttattaacctaaccgcaacatatagtaggaactattactttcaatctcttaaaactcttgggcaaggaataccgagaccgagcagcttatgttataatgttagtgtacaccttacccaccaaacacattgtcatacaaccacattatccctgtatccacctacacctgtacacaattcattaacaatatcaccgtcattagcttcaaccaactttacacatgttgcggtccatcatgccgcaggtaacgttgaagcacaacacaacactgccactccacatacaacgtggatcatacccctggttatcattataacaatcatcattttaatttgtttcaaatttccccagaaagcttggaataaattcacacaataccgatacaacagtatgctcgccgccgcttaaagaatcaccgtcgaggaaactaaaagctatgtacgtttatttttcagctcactgtttgaataccgtaaacataatgacgtacatatacgtggttatacaacaggtgtttgtgttatgcggcgactgattaaccatatcgtgaaccatgatcttttccgatggtctgtcgtgaccgcaatgatattttacaagtattccgaaacctgtatggaggtcactgtcagagtaggtgatccagttaccctcggtagtggacatggttatcatccaggacaaaaagtacactggtataaccagtcatgcgtcggcatcagcaacggcgaaaatacgcatcctatctgcacctacgaccctcctaaacctggtagacaaaagacaatgaaaaccactccgttgccatcaccactgttgtatgaatgtcacaattccacattaagcattcttcatgtaaacgtctcagatcccagaaactattgcaggcgaaaatgtccaccaaagggtaactgtgagtttcccacatgttttacattatcgctgatttctagaacgacaaccaccagaagacccggacaaaaaactacgctgtcgcgattaaaaactacgccaaataaacatacgcagcacaaaagatccacgcgaagaacgtcacttaaagattacaatgtaacgggtctgccgaaaggctttgcggactcgtttaccggtaacgtagaggcacatagagccaaagatgccgcacacagcgcatggattctcattgtcatcatcattatcatagtcgtcattctgtttttcttcaagattcctcaaagactccgagagaaatgggacaccaagggatacctttacaaagggaccgatggcctgcccactacggactaattatcgtgagcggacggatatgtccggtttcaaactcactgtttgaatatagggacagtccctacggaacctgagaacatgtggaaatcacctgtggtagaatgctgctcaggtacattacctttcatcgcgaaaaggtactttacctaacggctgcatgcatctttggtgtctacatcagcctccatgatgcctgcataccggtggttggcaagataggtaccaacgttacgttgaacgcggtagatgttctttcccctcgcgatcaagttcgttggtcatacggtccaggcgggcaaggctacatgttatgcattttcactggcacatcaacaacaacgtttaacagcacgcgctttaatttttcatgtctgagtaattacagcctcctcctcattaacgttaccgcgcagtatagtactacctatcgtactatgacatcgctagacgattggcgtcaccaaaaacataaccatggttttcgatggactttagacacatgttacaatctgacagtgaacgaaaacggtacattccccactaccaccaccaaaaagcccactacgactacgagaacgacaactaccacaacacaaaaaacaaccaccacgagaacaaccaccaccgccaagaagacgacgataagcactacccatcataaacactccagtcccaaaaaatccaccacccctaacagtcacgtagaacatcacgttggttttgaagccacagcagcggaaacaccgttacaaccaagcccacagcaccaacacgtggctacacacgccctctgggttttagcggtcgtaatcgttattatcatcattatcattttctactttcgaataccgcaaaagctgtggctgctctggcagcatgacaagcacggcatcgtgctcatcccccaaaccgatctgtgagcaagtcgcgtaggaaacgattgcatgaaatcactgtgaaacgccaactccgtgccaactggcacggcggacaggcctttgacgtatttgaagccaggcgcgctcttgataccgaaaggatccgagggggctttccaaagccgacgtccctgattcccttcataaagctgttgaccggccctagaaagaccaagagcatgctgtgggcccactgcggtcgcttcttgcgttatcatctgctcccgctgctgctgtgtagactgccattcttactcctttttcagcggccgcagtgggcccacggcttggacattgtcgaggaggacgagtggctacgggagatacaaggagcgacgtaccagctgtccatagtgcgccaagctatgcagcacgccggattccaagtcagagcggcgtcggtcatgacacggcgaaacgccgttgacctggaccgaccgccgctttggtcgggatcgctcccgcatttgcccgtctacgatgtgcgttccccgcggccgttgagaccgccgtcatcacagcatcacgccgtatcacccgaactgccgtcgcgaaacgggatacgttggcagtaccaagagttgcagtatatggtggaagaacaacggcggcgaaatcagtcgcgtaatgcgattccgagaccctcgttcccccccccggatccaccatcgcagccggcagaggatgcacgagacgcggacgcagaacgtgccgaatcaccacatagtgcagaaagcaccgtcaggcacgacgcgagtgagaacgcagtgcggcaacggcgcgaaagacggcgctataacgctctgacggtccgcagccgggactcgctgctcctgacgcgaatacgcttctccaaccaacggtgtttcggacgcgggcgtttgagacatcccgcgggaagtggtcccaacaccggcggaccgcgacccggcggtgcgggactccgtcaactacgccaacaactgacggtccgctggcagctgttccgcctacggtgccacggttggacacagcaagtctctagccagatcagaacccgctgggaggaaagcaacgtcgtgagccagacggccacgcgagtacgtacgtggtttgtggaaagaaccacgttttggcgtcgcacgtggattccgggacagaacccggcggccgaagcgcaagaactggccgtcataccgctggcacccacggtgctccagcagaacgaggaaccacgtcaacagcttacgggagaggagacaagaaattcaacgcacactcaacgtgaagaagtggaggacgtttcgagagaggacgcgagagaagggaatgatgggagccgagcaagtggaaacgacgagagaaggaataatgcgggaagatatgatgatcacgaggttcaagagccgcaggtcacttatccagcgggacaaggagaactgaacaggaggtcacaggaggagaacgaggaaggtggaccgtgtgaatcgccgccaatgacgacaaatacgctgaccgtggcctgtccgccccgcgaacccccgcatcgtgccctgtttcgtctatgcttaggactgtgggtctcgagctacctggttcgacggcccatgacgatttagaatacaccgagccattcctttatttcccccccccccatccccggtcgcttatgcgtgtcaaacactaccaataaagataatctgccaatagcaccttatatataatatgtggtcgcgtgtggtctttttaaggagccctgaaacacagacaggtatgggcggtggccggctgccgccgctgtggctgccgctactgatcgcctggagcgagtggggcaactgctgcctcgatgcgcctccggtggtgcgttcgccctgtctgcagccggtgcgcgaccgcaaccgcgagcggaacccgggctcaccgcagttgctgccttacggcgaccgtctggaggtggcctgcatcttccccgcgcacgactggccagaggtctctatccgagtccacctctgctactggcccgagatcgtgcgttcgctggtggtggacgcacgcagcggtcaggtgttacacaacgacgccagctgttacatcgccggcgggcgctggcgttttgaggacggcggcgcggcgcagcggctgagcctctcgtttcgtctcatcaccgagaccgcgggcacctacacctgcgtgctgggcaacgagacccacagcctggcgaccgagaccacggcgctggtggccgacgtgcacgacctgcgccactcggaccgctcctgcgacctggctttcggatcgcgctcacagacgcggtacctgtggacgcccgatccctccaggttgcgcagtataaactgcggttgggagggtgaacggcaccgcgtagtccactacatccccggcacctcgggtctgctgccctcgtgcgaggaggacgagcgcgaactgtgcgtgcccttcatcagccatagcatcgccgacaacaactgcagccgccggcatcgagtagacggcgctaggcggcgctatcatctgcggagggattactggctgacggatccgaagatcgggctgctggccgcgggatcggtggccctgacctccctctgccacctgctgtgctactggtgttccgaatcgtaccggcgcctgaacaccgaagaggaaaacgaggcggcggaggaaactgccgcgggagaagcctctgcggtagcggcggcggccgtctctgaggaagagcagcagcgggagtaaacggggagagccatgaagcggatgattcgcagtcacggcaggaaaacggaatgtcagatgacgggcgccggcgagcgacgcggctccgccgtcggtgcgctcatctgcgacagcggtacccgacgcggcagcggcgccaacgaacgccgcgactccgacgtcggtcccatcgcccacagtagcggtaccagacgcggttcggcaaatgaaacgtccgcctgtacgcggaccgatcaccagaaggcggacattgggctgtggttcatgtttctgttttttggactgtgttcgtggttagcgatgcggtatcgcgcacaataaattttgaatccatatcaaggaacgcgtgttttgtattttattgggaatattggcggggataaaccggtttcggatgtttacccttaatcttaccggggacctcgttgtcctctcccccttcttcctcggacaccgggcttcatgctgacgtaggtaccgactggggtcaaaagcctgggtacttatggggagcgcgcacaaaggaccgtcaggcgccggcatggagcgtcgccgaggtacggtaccgctgggatgggtgttttttattctttgcttatctgcctcttccccgtgtgctgttgacctgggtagcaagtcctcaaactctacctgccgcttgaatgtgacggagttggcctcgatccgtcctggggaaacgtggacgttacacggaatgtgtatctctatctgctactacgagaatgtgaccgaggacgagatcatcggcgtggcttttacttggcagcataacgagtctgtggttgacctgtggttgtaccagaacgatacggtgatccgcaatttcagcgacatcaccaccaacatcttgcaagacggactgaaaatgcgaaccgtccctgtgactaaactgtacaccagccgcatggtcactaatcttaccgtgggccgttatgactgtttacgctgcgagaacggtacgatgaaaataatcgagcgcctccacgtccgattgggctcgctatatccgagaccgcccggatccgggctcgccaaacacccctccgtaagagccgacgaggaactgtccgcgaccttggcgagagacatcgtgttggtctcggccatcactctgttcttcttcttgctggccctacggatcccccagcgactgtgtcagcggctgcgcattcgcctgccgcatcgataccagcggttacgcaccgaggactgaacggataaccgcaaaggccacgtgcaacgttcacgctgctataagaaggccatgtcccccgtggacgggtctctttgacacgagcgcggcacgccgttgccacgagcatggatcacgcgctcctcacacacttcgtcggccggccccgtcactgtcggttggaaatgttgattctggacgaacaggtgtctaagagatcctgggacaccacggtttaccacaggcgccgcaaacatctacctcgacgtcgcgctccgtgcggcccccagaggcccgccgagattcccaaaagaagaaaaaaggcggccgtccttctgttttggcacgatttgtgctggctgtttcgacgacttttctttcctcgggaggactcggagccactgatgtcggatccggcacggtctcccgaagaggaggagtaaacaacacacggctaagaggatacatcatcaaagaagataggaggggtcaaaacgcggactgaaagtatataacgccgatcatgtccgaggaactgttaataaaacgccatgatgacaatgtggtgtctgacgttgtttgtgctgtggatgttgagagtggtgggaatgcacgtgttgcgttacgggtacacggggattttcgatgatacatcgcatatgacgttgaccgttgtggggatttttgacgggcaacacttttttacctatcacgttaattccagcgataaagcgtcaagtcgggccaacggtaccatttcttggatggctaacgtctcggcggcctaccccacctacctggacggggaaagagccaaaggtgaccttatttttaaccaaaccgagcaaaacctgttagagctggaaattgcgttgggttaccggtcacagagcgtgctgacgtggacgcacgagtgtaataccacggaaaacggtagttttgtagccggttacgagggatttgggtgggacggggaaactttaatggagctcaaggataacctgacactatggacgggccccaattacgaaattagttggttgaagcaaaacaaaacgtacatcgacggtaaaattaaaaacatcagcgagggggatactacaatacaaaggaactatctcaagggtaattgcactcaatggtccgtcatttatagcgggtttcaaacccccgtcacccacccagtggtaaagggcggtgtccgaaaccagaatgacaacagagctgaagcattctgtacatcttacgggttctttccaggggaaattaatattacttttatccattacggtaataaggcgcccgatgatagcgagcctcaatgcaatccgctacttcccaccttcgatgggactttccatcagggatgttacgtagccatcttttgcaatcaaaactacacctgccgcgttacacacggtaattggacggtggaaatccccatcagcgttacctcacctgacgacagttcctcgggggaggtccctgatcacccgacagctaacaaacgctataacaccatgaccatcagcagtgtcctcctagccctgcttttatgcgctttgctattcgcgttcctgcactactttaccaccttgaaacaatacctacgtaacctggcctttgcgtggcgctatcgcaaggtccggtcgtcatgaccagcaacgccctgtatgagctgtttcgacgtcggttaccgcgtgcccccgtcaacacggtcatgtttctcacgcgacgcactcgtgatgggttctgcggtcggttgacgtccatcgccacgaattcccactacactatgttcgtgttagatcacggatccgtgcgcatcgagcgaccgagtcagtcagaagtggattgcgccagtttaatggaaacgctgaagcggattcggttacgaaattcgtgggtagcgtcagaagacgagctagatgtgagtcgcagggacgcgtgacacgaaacgcgttcaggattaacgtaggttttcgaaataacctacgtccgtgagtgacgcggtttcgtgttgaaacccgcgcccgcttctcacggtggtttatgatgaaaccggcgttgcggatccacgcgggttcctcattcaacctgcgaaaagaggaagttgcggtaaaaccacgtcaataaagacgtcaatgacacctcaatgttgcgttggaacggtctttatatatacaaacgccgttatgatcagtgtccggcaagatgctcgggatacgggctatgctggtgatgctggattactactggatacagttgataacgaacaatggcactcgaagcaacaataccgataccatctttgtatctctccttaccgggcccaacggagttactcgcacagccatcggaggtctgtattcaaactacaccaacttaactggagcatttggcttcacttcaacaaatatgtcagcaaccaactcttccgctgaggataattggagcgtaaccaacctgacggagagttgcatcaaccgcggtgagtcctatgtgactaccatctggcttctggactgcactaaaaacgatacttattggtactatggaaatgcctacaatcatacatgtgaaggtacaatttcgggatatctcctgggcatgtgcaagctatggaaaagttgggtcaataatattacttcttataacactgtcagagtcgaatcgctgggaaatgaaacacggtgcatgctgctccctagacagtatactctcaacgccacggtggaatggtacaacaaatctgaaggtgacgtaccagaagaattcatggactatgttatcctgacccccttggctgtgcttacatgcggactgcaggaagcttatatactcgacaaaggtcgtagatacatgtatttgttttccgtgtcctgcgtgggaatcacaggtaccgtatctattatactcgtctccctatcgctgctcatcctcatctgttactatcgctgtggccggcttctgatatgcccacgcggctttgaactcttgccagaattcactgaggaagaggaggaaaaagaaaaattgttaacgcataatgacattgaagtccaagtgcctattcgcacgcggcgactactcgtcccttggatccgggagagcaaaatgtgggtactaccacccccgttgcctccacgacctccccacttaatagaattcccgccgtctcctccgtcatcgcctgggcccatgcacatggtggtctgcatgccagcatgacgaactttggactctgagccccaagcggtacgaactacatattttccataaatctacactgaacttgagcacaaagatactgacaatagactggatatacagacttttatatgatccctgtacagatgtaaataaaatgcttttatttaaaactggtcccaatgttcttcgggaatcatggggtggggacgggggacgcggtagggagcaaaaccgggtacatgggggggaacatcgtccaacagtagcaccagcggattgggtaggggttgctgcggaggtcggtcgatgacgatgtcgatctccatcggcagatccggcaacatctcttcatctccctcaccgaccagcactcggcgctgttctggatgtatatgattctggaaaagcctccgacgagctcgcggcgcgtagaaagccaagcggcgcaagggccggcgagcccgaaagtccatgcgcacagatggcatgagtccttgagtgacggtggtgagctggggaacagggctacctcccatcgcgacggtgacagtggatccatgagagaggcgccgcacgctgcatggctaaataccgtgaatcccctgacgtcgtctttcgtcccgaacgcgtcatgttgggggcgaggcgtaaaccgtcgaggttgaaaaaccgcgtatctgcgacccgtccggactacgttgttttttagaagcggccacatgacctcgagatgtcgtcacccaaggtatttaacggcacacagccagacgcgttcgtcagcagcgacgccgacaagacctcagcatggctcggaggctatggatcttgagcttactagccgtgaccttgacggtggctttggcggcaccttctcagaaatcgaagcgcaggtaaacggaatctggggaattcaacacaggtaagaaatataaaaaaataacgtgattgtgaacgcggttatcgtgtttttgcagcgtgacggtggaacaacccagtaccagcactaactccgatggtaataccacccccagcaagaacgtaactctcagtcagggggggtccaccaccgacggagatgaagattactccgggggagactatgacgttttgattacggatacagatggaggtaaccatcagcaaccacaagagaagaccgacgaacacaagggagaacacaccaaagaaaatgaaaagacccagtagcagcagcagatcccaagggttaaagaccatgttgactattttgttttttattaaaaagctgtaaggttttgctctaaaaacaccccgcctccggtcttttttcttttgtattcggcacgcgaaacacggtttcttcccatagcctgtctaactagccttcccgtgagagtttatgaacatgtatctcaccagaatgctagtttgtagaggctatgcgggatgctgcggcggcgcgaccttccctctccacccagccccgtcaaaacacacgcgactcgagcggttcgtatgaaaaataaaaaacagctttttatttacaggaacggggaaaaaaaaggcacacggtccgtgggagacgcgggttcacgcgtcgtcaaaaagttggtggtccactccgtaaggacaggtaggcttatttagcttccgcatgctcctggttccgtaataaatgccgttttcgtggcagcgtgtcatgccgcgagtcacaaactccatcaaactgtcggccacgatgcaaacgtgctgattgttggcagcaaagacgcgcatacagtcgtccacgaagaggttgatcacgtcgtaggggctcaccaaccagcctaaaggttccacgtggttactgccgaccatgaccctccagtcgttaatctcgctccagtcgtacagccgaatcgtggagacgcgaatgacgctgtaatcacccatgaccatgagtcggccgcgatacgtagcacgccactgcgcgaacgcgtggatgtgcatgcagccggccagcgctctaagcgaggcggtgtgcggcagctcctctgggacggtgatgaagttgcagcgtcgcaaaccgatgttgagaaattcagtgatgctctcggccacaaaggtcaacgagtcagagtagatgtggtcggtccacaggtacatggcgcccgaggcgcccaggtacagttcagacggcacgttgtgatcgcccttgtgtttaagaaagttgtaggtgcagatgctgccgacgaaacgcagcggctcggggcagcagaggtagctggccagacgctgtgcatcccgtccttcgtcgcgcaccaagcgccagcgacgccggataacgaggcagcggtctttgggccagaccagggccacgcgttgcccgggtttccacggtcgcgacgtcttaggaggcctccagcggtcgagcagattgagaaaacagtccttgattaccgacatcgcggtcgcgcgtcggtggacaaaaagaaatcgggccgatccagaaaaaaaaaaaacgacagcgaaacaccgccgtgctcgagcgaagggtggcggagggccagaagaggcggccttgacgacgttggcagcgaaaaaattggcacgcgagtcaaacgggaagtagcgtcggtgttttatgccccaagcagcgtcgtcgtcactcgtggcgtcacagtcaacggtgctgacgtcctttggggcagtcgggcacgcgatcgtagatgccgttgtggccgctgaaacgtcggttttcaaacagcaggttaagtcccagacacatgaacgtgttcagattatctcccacccggatgtagcggtcgtcgcgcacgtcgcaggcgtagacggccccggtataggcgacgacgatggggataaggtcgacgggccagcgcaggtgaggaaagggcgcgttctcgcccttgaggctgacggttcccaggccgagaacgcgcattccgaaagcggttttgatgttgcgcagcaagtgaccgccttccacgctgttttcgaaacacctgaggttgcatagacgcagttccgttcccggcgggaacgtcaatggcatgaactgcccgtggtggcggatgatgaatcgtgccatggtatccaaaccgaggctccaggcgcgcaacagcgggcgaaagtagcgcttaaccaacgacgaggtcaggtagcgcatgcagtgcagggtttcgacggcgcgcagcccgacgcgcgcaaactccatgaggttgcgggccaggtagtagacggcggtgtcctcgcgtacatagcaaaagacatagccctcgtccgagatgaggcacacggcggtcttcttctgctgatccggcgacaacacggcctcgttcacgaagcgacccacgaaggccaggcgcgtctcgcagcacaggtagtgactccaagctttcacgtcctccggtttgaagtcctcgtccgtctcgatctcctgcagcactaggttccagcccggcggccagaccacgggcaacacctggcctgcgttgatgcgcacgtaagcttccagacagcccaggccgaactcggccgtgagcgccaggctagccagatcgctcatgtgacgcgccgagtcggtgggcgagcccgggggcccgtcgcacaccacgctccgtcttcttgtcctcaccgcggccagcgtggcgaggacactttccgcgcccgaggctgtatcttcggtttgcccgccggagccggccctcactatataacgtcccgcccgggtctcctccatgtatgcaggtaagcaactgagccgaacgcacctcagcagacgagaggatgtcgtcgcggcgtcgcagctcgtcacgtcgctctggcgaaccctcgacggtgatttatatcccctcgagcaacgaggacacgccggcggatgaggaggcggaggacagcgttttcacgagcacgcgggcgcgcagcgccacggaagatctggatcgcatggaggccggtttgtcgccctacagcgtctcctcggacgctccgtcgtccttcgagctcgtgcgcgagaccggcggcaccggcgccgccaagaaaccgagcgaaaagaaacgatcgtcgtcacgtcggcaaccgcagatcgcagcgggcgcgcctcggggctcgccggcgacacccaaggccggcaagtcgcctaaagtctcgcgaccgcctagtgtgccctcgctgcccgagaacggcgccggcggcggtggcgacgataacagcagcagcggcggtagcagcagtcgcaccaccagtaacagtagcagaagcaccagtcccgtggcgccaggtgagccgtccgctgccgagggcgatgagttttccttctgtgacagcgacatcgaagactttgagcgcgaatgttaccgggtcagcgtggccgacaatctgggcttcgagcccagcgtggtcgcgccgcagcacgtcgagtatctcaaattcgtgctgcaagactttgacgtgcagcacctccgccgcctcaacgaatgcatacccatgccggccttcgcgctcaccagcctcgtcgaccccgtcttaaacaacgtagcgcctggcgagcgcgatctcacgcgtcggataatcacgcacgcggtgatcatcaactattactacgtggcgcaaaagaaagcgcgccacatggtggaggccatacggaccaccgtgcgggacgacacggtacgccgggtagccgcgcaggtcaacaaccagagccgttcggggcgtgcggccgcgctagcgcttcactttctcacgtcacgaaaaggagtgacggacggtcagtacgccacgtctctgcggcggctggacgaagagctgcggcatcgcggcacgcccgaatcgccgcggctcaccgaggtctaccagacgctacgcgattacaacgtgctcttctataccgcccactacacctcgcgcggcgcgctctacctctatcggcaaaacctgcagcggctcaacgaaaaccaccggggcatgctccggctgctttcggtcgaagagatatgcgaagagcacacgctcaacgatctggcgttcctagtaggcgtcgagcttatgatcacgcactttcaacgcaccattcgcgtgctgcgctgctatctccagcaccagctgcagagcatctcggagctgtgttacctcatctatgtacaactgccgtcgctgcgcgaagactacgcgcagcttagtgacgtgctctactgggccgtcagtcaaaactacgactacgcgctctacgcgagcacgccggcgttgtttgactttttacgcgtcgtgcgtcagcaggacgccttcatttgcaccgactacgtgtactgcgccctgcgtctgctggcctgtcccgacagacctattatcggtgacaccggcggcagcagtagctcccaacgcctcgtaggcgagtttatggtgcgcgatccgctgttgcgcgacccgcgcgccacccacctgcgccagaaactcatcacccgcgacatatgcgtggcgcggttgcaagcgcagccctcgagtcgacacattccggtcgaacacacgggtgtctcctccgtcaccctgctcaagatctttagccaggtcccccccgacgaacgcgaagaagacacgttacgcgagatggctcttaaagcgtttatggaagcgaacggtaatcaccccgaacaaatctgccgatccccaccacccccgctgccaccgcgcgactatcctcaacgcgacgagcgggaccgtcaccgtcgcgaccgccgcgacagcggggaatactgttgctgatggtgggacgaaacagcagggcggaacagtttatgatagaaagtcacaggaaagtatgtgttgttttttttttaatgtaccaagaataaaaagtgcgtctacgaccaaagcggtgtgtggacgctcgtcctctgtcttctccggtttttttttatgtgtgtgtttttcttttccttcctattttgttacggcaacagcgctgatggcacgttgccggcttcgaacatcgcgtcggtgatttcttgcttgcccggcgtcacacggtgacgcagcagcgcgcggctcacgtagcaggccgactcgcggatgacctggccgtcggcgtcgcgtcgcaggcccgagcggttgccgtgacgcagtcggccctgcgcggcgcgctccacgtcttcaaagtagctgtgtagcaggccgcgctccagcagctgcggcagcgagtcggcggcgcgcaccacaaagttctcacggctgatctcgtagcacagcacgctgccgtcggctgccacgccggccacgctgcggtcccaactgaagaggttggcgagtccgatggtgccgatgacgcgcaactgaccctgggtcaccaccagcagcttccagtattctacgtcgcgcggggtgaggatggtctcctccacgtcgcagacaaacaacgtgtagccgcgcggatagggcagatccaggtggcgaccgcgctggcggcgcataaaatcgtctaaattcaaaccgccgtcgggtgcgcgcctgctcgtcatcgccgcgcctcgtcggtcgatgaccccacggtgcttataacgcgccgccgcggcttcatgtggcgtgacctccgacctcgtgaggccgaaaacggcgtacatgaagacgctcaaacttttgaatgtgggcccggtagcgcaccgagggccccggggcggcgacgacggcgggtccgagttccagcggggccttgcggcggcagcggttggcgtggttgctcagctcggcgtccgagagcgccgagctgaactgcggcagccgcgtgcgatcctgcggcgcgtccccgtgtcgcagcgagtgccagagcaggcgctggacgcgcgccgtctcgggcgtcggcggcgcgcgacagccccggcgcagcttgaaaacgtgcaggcacagcagctcgcgcttgatgcgcagcgacacgctgcggtagtcgggaatccgctgcaccagctcgagaaagtcgcagaaggtctccacgaacgtgtcctcggtgaagcgaatgcgcttcagatcgtggacgtgtttgcgaaaccgcgacagttctcgacgttgcacggggttctgagcgagtcccttgcgcagcagcgcagcctcgcctttaaacagcctgatgagccgctgcacgtccccgctcaacatacgtatacacgccgtgtactcgtgacgtatactggcgcgcagcagccgaatgatacgcagggccagcacggcgttggaggccaggtacatggcgtagccgcgacgcgggttggcacaggcccagcccgcggggagcagaaagtagtcgtcgaccagcgtctgcgaccagtcggcgaagcccaggtcacgtgatacgctgtcctggacgcgggccacgtcgccggctgtgaggtggcggatcgccggcaggtgaaacgcgcccaggtgtcgattgcgctccagcctcagctcggcgtgctccaaacgggaatggtgggacgccaccgcggagggcgacaaagaggagtggtcgccgccgccgtagttaccgttgtgattaccgccgtcgtcgcgcccgtcgccgcactcgcaaaaggccgcgtagaggtccttcaacgccgcttcggctcgcgccataaacgtggcgtggaaaaaaacggcggcgcggtgcgtccggtacttgacgggcaacccgcggcacagggccgccggcaggcagcggccgatgagttcgcgctcctcgggctccagaaacaggcacagggtgccgtccaggcgcaggtacagctcctcggtcatcgagcatagctgccgcaagtaatgggtgcgcgtcccaaaggtcttgtaatcgagcaacgtgcacaccacgtattgccccgtggccacggccagagcgatgcgtttggcggcgcgactgatctctggcaagtactgcgcctcgtgcaccagacggcggaaagcgccggcgttgagccagcgaaaatgctgcggatcgggcggcaagggcacgcctcgaagcgcggcccagacagcgaggtccgactcgagcgtcagaccgcggatgtcgtacttgccgtgcgccgtagcgcaggctgaatggaccagacagctgcggcgaatgtacaccatggcgtgcttgggatgtttgggcgccggcgttttctttttctgaccgccggcggccgccagatcctcgggcgtgcgacacaacaggccggcgcgcacagcctcctgtcgattacgaatcggcgtcaggtaggcgcgcaggaactggtgacaaaactcctcatcatcacgacagtcgtcgagatactcgtacgtggtgagcggatcgcgaaataggcgctcgtcaccgtcgtcatggtcttctttagcctgctcctccggctgctgggttggcggtggaggcggcggctgatccacggggttcatgactgagaggaagaagaaggtggcggcgaagcgacgcggagcgacggcggtaaagccagacaccggctatatagctagtcatcacagtctcctccttcacgacgcccccgtgccgctcacgctatccagcacgctacggcccgaaaacacgtactcgctgacgtcgtacgcgggcgatgtatggctgctcaccggtttcgcggcgacggttgcgctcgagtccaacggcgagaagcaaaaacgccgtgggcaacgaaaccagaaggagccctgacggataaaaccgcgcagcgtctcggccaacttaaccagcatcgtaccgtacagcagtacgtgaatgccgccgtgcgcgtccataaatacggctttgtttacgggttccatccatccgatgactacaaagtgagcctgttctagcacgccgatcacaaaattgttggcctcgtcggcctcggccacattccacgagccgaaagtgaaagtacaagcgggcgagccgcccaggcggattttgctaccggcgtggagctgacatacgcgcagcagattggcgcggtcgtgcagtatctgggagagttcgtacatgcccgcgaaggtgtgcttaaaccacgcgccctctacgatttcatccacgtaatcgcgctcaaagaagctatacacggcaaagaggccgttctcaaaaaactcgccgaacgagagccccagcacgtacaccttgtcctcgccgggcaggtacgcaaaggcgtgcccgtgcccggagacccagatctcgggcgccgtgtttgcgtccggcacgcattcgtacacactgacgaggccgataaagtacaagcggccagcctggcgcaggcacgagaagcgccggtaggtcttgtgatcgcgcaccaccccaaagtactgagtgtcgcccagcatgatgccgtgcagcggcggccagcacagcgggagccaacgacccgccgtggcgcgcacgtagcgctgcaggtgaaccccgctcgcacgctcgcgcggcttcgggcgcttgtgggtccaggcatcacgcagaccgcgccagatgctgctgaacttgggctgcccgcgcagatagagcgacgagagcgagtcaaagtagcccacgacgagcctgtcgggagacacaagagcgcgaaaatcaaacctagagcgacgacggtgaaaaaaccgattataagcgcgtgtctcaaacacgctactttcggttataaaaacaccgtcgccctatttctgggcgtgtgtacactgatgactcacctacgctttttgaacggcagtctcagctcgggattggcctcgtacagcgagctgcggtccacggggccgatgctctcgtagcgaaagtcgtcgatgagcagcgccagccccacgcgcacgaagcccctgaggtcgcgcgccagccgcaccaacttatcctgccccaccagcgccgcgtacacggtacccgtgtcgccgcagagaatccgcacgcggtgaaagaaggtcttgtcctcggcgccctcgatctcgcccagcggcatgacgggctcgcgcgtgtacaacgaacgttgaaagcggcgcagcatcgaggccgagagccccagatcgcgcgccgtgcgcagcaccagggaatgcttctcgggccagatgagggtcagctgcgcctcgcgatgcgcctctacgtaggcgcagcgagcggcggtgtcctcgcaagccagcaactcgcggaaagccagcagcgaacgtaggtagcggccgcgagcggaggcgcgcgagcggcggcacagctcggcccgatgatcgggatgcaccaagggcacgttgggttgcagacgcgcgcagatggattcgtgcaccgggtcgcagcggatcatgcccttggcaaaaaatccggccagatccgaggccaactcgtacaggcagtcctcttgcgcgtcgtaggcgaacacggcgccgtacgcgtccacgaacacctggtaccggcaggtggcgtgcgagaccgtgccaatgagatgcagagctcggaattcgccgaaaaagtcgttctggcagtgctccagatcgatctcggtcagcgagtgcggcgaatgctcgcccccgaccacgtagatgcactgcgagggccagcccagcgacacgcacgagccctcgaagcgccgcaagtaacgccgcaggccctcatagtcgcgtcgcacgcacaggtcggccaagtcgcgcgtgcaaaagacctcgggtaccaagcagcgtttgcgacgcggccgacgcgcgtgcccgggcagaggaggaaggcgcgacggcggcgacgacgaggaggaagacgccgtggccgccgagcagcccttgcgacggccggacatgccggcagtccgcgacgatccacaggagacaaaaaagcagaagcagcagtagcctcggcgacccgctccaccccgtcctccacacgctcagccgcgactgaacgccggggcgcgccgctacttgggtttttatagccatctgccccccgtctcgggcacccgggagcgatctacggagacctgacagcagttgggcaacacaagatagggaaatacaaagacacttttaataaaaaacgagactactttgtgtgtgtgctccgtaaactgtttattctccccctccgcttcgctctggatgggctccgggcccgtcaacacgcgactcgcgcggcaaaaggcacgctgttgacggcgcgagagcccgtcgtgatagtccatcatgccccggagatcgtgcacaaagcagctgtcgccgcgcagaaaccgacgcagcgtctccacgtgctgcagctgccggcgcgtatcaggagccgtcatcgctgatgtcgtcatcgccctgacaggcgcgtagatggctccgcgagatcacgcgcgttttcaaccgccgtgacacatcaggtccatcttgagctggcgccgggcctcgcgcaggtgtcgcacgcgttgtgagcgggaggcgagttcggcttcttgctcgaactcctgctgctcactgtccgagagggtgcgataaaaggcggcaaagtcctccaagtcggctacatgcgccctgggtctgacgctccaaagcgtacgcagtctgatgaagcggacccatcgagcgtcacggcacgccgtcttgaacgcggggcccgggaagaggttcttctccccggcgcgctcgggccggcgaggccgacgcggtttatatacaccgtctcggacggcgggacgccgagcccgcgccgcggccgctcatccggagacggcggaaaccgcggcgccggaggaaacggggaccggcaacgacggcggtggcggcgaccagattatgggggaaaaacccacgcttgtaaccctgttgaccgtcgccgtgtcgtcgccgccaccgtcgtcgccgctgccgcttgtcagcttcacggagctgctgttaccgccgccgtccgtcgccgccgccgcggtggcggcgacagcgacgagcgaggtgggcgagaaaaccgcggagcaagaggtagcggctgcgggtccggagaccgggaatgagagaagagaaaacagggagaacgaaggaggggagacgaggacgacagacaccaccgcggtcaaaaggtcgcacgacggtatccctcgccaactagcagagcgcctgcggctgtgccgccacatggaccccgagcaggactatcgtctgccggcgcaggacgtggtgacctcgtggatcgaagcgctacgcgacgcggaccgcgataactacggtcgctgcgtgcgccacgctaagattcaccgttcggcctcgcacctgacggcctacgaatcgtacttggtgtccatcaccgagcagtacaacacggcctcgaacgtgacggagaaagcttcgtacgtgcagggctgcatctttctctcgtttcccgtcatttacaacaacacgcagggctgcggctacaagtacgactggtccaacgtggtgacgcccaaggcggcgtacgccgagcttttctttctgctctgctccaccagcgagagctccgtggtgctgcaaccgctcatcaccaagggcgggctctgctcgtccatggcggtttacgacgaggaaaccatgcggcagtcgcaggcggtgcagatcggttttctgcacacacaactggtcatggtgcccttcgtgccgcacgcctgcccgcattacgccgtgcctttcacgacgccgggaaagccgggctgcggcggtgctccgagcggcgttgcggggttggaggaggcggcgccctttggacgggtcagcgtcacgcggcatggcgcgacgctgctgtgtcgcgtggaccatctgacctggatcagtaagcgcgtaaccacgtacggacacaaaaaaattacgcgctacctcgcgcagttccgcggcacgatggacgacgacgaggcggcgctacccggtgaggacgaagcgtggatcgcgtccaaaaacgtgcagtacgaattcatgggtctcattttcaccgtcaacgtggattcactatgcgtggacgcggaacagcgccaactgctgggcaccgtggccacctccttctgtcaccgcgtctcggacaagatcacggcgcgcaacatgccgcgcgccttttccttctacctgctgacgagcgcgcagcgcgggtacgacctgcgatttagccgcaacccgtcactcttttttagcggcgacgcgctcaactgtccgcttctcaatgagcccaacgtgttttcgctcacggtgcacgcgccttacgatatccacttcggggtgcaaccgcggcagacggtggagttggacttgcgctacgtgcagatcacagaccggtgtttcttggtggccaacttgccacacgaggacgccttttacacggggctcagcgtgtggcgcggtggcgagccgctcaaagtcacgctgtggacgcgcacgcgttccatcgtgatcccgcagggcacccccatcgccacgttgtatcaaatcaccgagggcgacggtaacgtgtactcgtacaaccaccacacggtgtttcggcagatgcacgccgccggagcaaccacgttctttctgggcgacatgcaattgcccgcggacaactttctcacgtctccccatccctgaccctccgtccgtcctcctttcccgacacgtcactatccgatggtttcattaaaaagtacgtctgcgtgtgtgtttcttaattattcctccgtgttcttaatcttctcgatcttttggaggatgttctgcacggcgtccgacggcgttttggcgccccccatgccggcagaacccggttgcggccccgtaccgctcttctggggcgacgataggtcgaaagccaccgttttcatgcccgtcgtgctcttgacgggggaacctacggcggcggttcccgtcgagcggcgtgattgcaaagccgcgctcgcccccggtttcaggatggagggagaggccacaggcggcgcattcgatacgctgcttttggccgtagacgacggtgggtaaacggtggttaccgcgggatacgtcggcgtggtcgaggcggcccggctggtgccggacaggcgacccggcgcgctaccgctcacggggaccgagggcggtcgacctaccaccgctttgccgcccaaagtaggtttcaaggaaggaacaacaccgacacggccgccccggcctttcaccggagacgggggggcactcttggccggggacggagaggctgacgaaagcatggacagcggcgatgtggcgggggacacgacatcatcctccgtgggcgacaaaacggacgccgaagctgacggctgtcgagccgaagcggaagaggttcccgcgccagaagtcacgttccttgatgacgtcgttttagacgaagccggttgaggttgcaacagcgtggcgggtaccgtcgacggcgtgcccgacacctgtttctctagccttccctgaaccggtgtcgacgtcaccgtctgcgctcgggcggacgcgtgcggcgtcgcgactcgcttgcccagcaccggtttctggctcgtggatgtcgtcgtcattggagacgataacttagctttacgtattctggacggcgtcgactgctcgggcgtctgactgggaggcgaaatgacgtcgttgtaatcggacgacggtgttgtgtgtcccaggctgacgacggagccggtgtccgaggagtcgtcgtcttcctcctcgctgtcttcgaccggtgactctgcagtttggtcccttaaagcccaaacctcatcagcggcgttctgagacgctgtttgtgtcaccgcggcgcgtggagtcgacggcctccgaggggtggtggacacggtgttttgagaagccgtggaagtcgtaggcatcctgaagggattgtgagccaggtgaggattcttgagggcccacgcgcgttcgcgcggccagttggcggggttcatatccccgggcaacggcgccgtcggagcccagggcgagttaccgttgaccggggtttgggtacccgcgaaggtaggtgtcggggccggagcgggggccgtggaaggattgacaggcgtcggcgtgaggatggcagtgccggcgccagcagggacgttaactccggcgccgaacgtcaacgtcggttgctcgaacttgtacgcggtggtgacgggcggtttggcactcgtctcggtatccgtgatgtccaccagcgtgtcggtgaaacgcggatcttgacggttggggggatagccatccgagctgtcggaatcctcgtcgcccgagaaaagatcccctctggtctccgtgagcggcctcacgtcccacgcgctgtcccgacggacccttcccgggctggccttggtcacctgcggggagacgagactgaaagccgcgtgacgctgttgttgctgcgggatgttcaagggaccgctggtcggtttctgactgcccgaggataacaggccgctgaaaacgctggaaacaccgccaccactagcgacgcccttgccgctagttcccggtttcttgatgggcgtaaagatgtttttctcgtcatcgtcatcgtcgtcgtcctcatcggcactggagccaaagagcctccgggaggcgctcggtttacgtgccgggggcggtggttgctgttgacgttgctgcaggttctgctgcctctcctcccaagccttcagctgctgtttctcacgctgcaccacctcgtcgtccacccgtttctgccgctcgcgacgcttttcctcttcgtcgtaatagccgacggccgccgaacgggcggcgtgggcgtcggcggccggtgccagagaaccatgggcctcgaagcggaacggtttgtgtcccttccagggactggcgatccagctccagccgtccagcggctgcgtggggacatgtttcttgggtaccgacgagaaggccgaaccgccgccgagcgagaggagattggcgtcatcatcaaactccaacgacggcgagcgcgcgcccaaaaaggtgtgcgccgactgcgggaagctgtccacgtagatgtcaaagtcctcgatgagcagctccagcagcgtgtcggccgagtcgccgttttccacggcgtgcttgaggatattgcgacagtagttggaatcaaaggaaaggcacatacgcagctccttgaccagcagcttgcagcgctcctgaatgcgcgccagacatttgcgctccagctcctcccaagacctacgcacgttcatgatgagacggcccgtgtacacgagcttgttgacggcgttgaccagcgccgtgttggcgtgccggtccaggttaaggtcgagcggtttcacacagaacatgttacggcgcacaccctccaggttttcttcaatgcgctgcacctccgtatccttgaggtgcacaaaggcgatgggttccgtctggccgatggctgtgaccagcgtctcgcgcaccgacatcttggccagaatgaccgcgcttacgagcgcgcgctcgacgatctcggcatcgtggcgcacgtccgtatcgaattcggtatggtctagcacagccaggtgatcgcgcgccttaccacgatcaccgaacgggtaagtgtagccgcgacgcgccacggccgcgcaacgcacctcgaactcctcgagcaccgaggagaggtcggggttgtggaaacgcagctcgcggtagtatcccaaccaaagcatgagctcgttgaacagcaccgtacgccggtgcaggcgtttttcgccacattttttcaggatcttggggtgtgcctcgagatccacgtcgggcttttgcgtgagatggcgcagaaagttgaccagggctaccacatcgcgccgctgtagaccgataaactgcaaactcatgctggcttttctccagaacccggaagcgtcgtcgccccggactgcgcccgcggtctgctattcgcccgcgatggacaccatcatccacaactcggtgagcgtcccacccaaagggagggggggtagtttaatagcggaggcggatacgcggttttcttttaagcgccgctgacttgtttcttctgttttttcgccccgtgtgctgttccgcccagacccgcaacaacactcctccgcacatcaatgacacttgcaacatgacagggccgctattcgccattcgaaccaccgaagccgtactcaacacattcatcatcttcgtgggcggtccacttaacgccatagtgttgatcacgcagctgctcacgaatcgcgtgcttggctattcgacgcccaccatttacatgaccaacctctactctactaattttctcacgcttactgtgctaccctttatcgtactcagcaaccagtggctgttgccggccggcgtggcctcgtgtaaatttctatcggtgatctactactcaagctgcacagtgggctttgccaccgtagctttgatcgccgccgatcgttatcgcgtccttcataaacgaacatacgcacgccaatcataccgttcaacctatatgattttgctattgacatggctcgctggactaattttttccgtgcccgcagctgtttacaccacggtggtgatgcatcacgatgccaacgataccaataatactaatgggcacgccacctgtgtactgtacttcgtagctgaagaagtgcacacagtgctgctttcgtggaaagtgctgctgacgctggtatggggtgccgcacccgtgataatgatgacgtggttctacgcattcttctactcaaccgtacagcgcacgtcacagaaacaaaggagtcgtaccttaacctttgttagcgtgctactcatctccttcgtggcgctacagactccctacgtctctctcatgatcttcaacagttatgccacaaccgcctggcccatgcagtgtgaacacctcacactgcgacgcaccattggcacgctggcgcgtgtggtgccccacctacactgcctcattaatcccatcctgtacgcactgctgggtcatgactttctgcagcgcatgcggcagtgtttccgcggccagttgctggaccgccgcgctttcctgagatcgcagcagaatcagcgagctacagcggagacaaatctagcggctggcaacaattcacaatcagtggctacgtcattagaccccaatagcaaaaactgcaatcagcacgccaaacgcagcgtgtcttttaactttcccagcggtacgtggaaaggcggccagaaaaccgcgtccaacgacacatccacaaaaatcccccatcgactctcacaatcgcatcataacctcagcggggtatgagctttcctgttactttattcagaaagcaccagaacccgtcgccatttcccctcatatacggtacacgtccccctgatctgtcatcacggtacacagatttcgcccgactgcggacgccgacggccaatcgcgtggcgtaggagtggcgccccggcttcattataacgccacgtcggagcccctgcgcgccacaacgccgtccggcgcaacttctgtctcggcacggtacgataaaaacgacgtcccccgtcgacgttgttttctccgagcggtgatcgttcccgtccctatcctccctccgcggcccccacggcggcggcctgctcgcacggacctatactattaccgccccaccgccgtcgtcgtcatgaacttcatcatcaccacccgagacttctccaacgacgattcagtcctgcgagccgccgagatgcgtgacaacgtggcaggctcgatttccaaagcgtacaagggcacggtacgcgccgaaggcaagaagaagctgctgctgaagcacttgcccgtgccgcccggcggctgctcgcgccgcaacagcaacctcttcgttttctgcaccgaacgcgactaccgcaagttccaccagggcatcgcacagctcaagcgcgcgccggccgaactggacccccacgagatccagcaagtcacggccagtatccgctgccgcctgcagcccagtctccgcgagccgcccacgccggccgacgagctgcagacggctgtgtcgcgcgtgtgcgcgctcttcaaccagctggttttcacggcccagctgcgccactactgcgagcaccaggacaaggtggtgagctacgcgcgcgacgagttgaccaaacgctgcggcgaaaaatcggcgctgggcgtggaggtgcatcaactggtagccttgctgccacacgagcgccaccgcgaactgtgccacgtcctcatcggcttgttgcaccagacgccgcacatgtgggcgcgctccatccgtctcatcggacacctgcgccactacctgcagaacagcttcctacacctgttgatgaactcaggtttggatatcgcgcaagtcttcgacggctgttaccacagcgaggcctaccgcatgctcttccagatcggtcatacggactcggtgtcggcggccctggaactctcacacagcgcggcggccgggctgcccgaggccgatgagaacaacgacgagggagaggaggacgacgacgagctccgtcacagcgacccggcgccgcttcacgagtccaagaagccccgcaacgcccgtcgtccccgcacacgcatgccgcctcacgagcaaaagcccgaagaaaacgaggaggaagaagaggagctgtttccctcctgcaaggcaaccgcagcattcctgcgggcagaaccctccgtctccaacgacgacggcaacggcggcgaacgctgcgacacgctagcgaccgccctgcggcattgcgccgacgaagaagacggacctctagccagccagaccgctgtgcgggtcgccgcgaccccctcaccttcagtcaccccagcccttacccccgtcacgtcccccataaccccgttgtgtatttaacgtcactggagaacaataaagcgttgatttctcaagttccgctctggttttggtttcgttttcaaagggagccccatcatggcccaaggatcgcgagccccatcgggcccgccactgcccgttctccccgtggacgactggctcaactttcgggttgacctgtttggggacgagcaccggcgcctgctgctcgaaatgttgacccagggctgctccaactttgtggggctgctcaacttcggcgtgcccagccccgtatacgcgctggaggccctggtggacttccaggtgcgcaacgcttttatgaaggtaaagcccgtggcccaggagattatccgtatctgcatcctcgctaaccactaccgcaacagccgcgacgtgttgcgggacctgcgcacgcagctcgacgtgctgtactcggagccgcttaagacgcggctgcttagagggctcatccggctctgccgcgctgcgcaaaccggcgtcaagcccgaggacatcagcgtgcacctgggcgccgacgatgtgacattcggcgtgctaaaacgagcgctggtccggctgcaccgggtacgcgacgcgctggggctgcgcgcgtctcccgaggccgaggcgcgctatccgcgcctcaccacctacaacctgctgttccacccaccgcccttcaccacggtcgaggcggtggatctgtgcgccgagaacctgtccgacgtaacacaacgtcgcaaccgaccgctgcgctgcctcacctccatcaaacgcccgggctcacgcaccctggaggacgcactaaacgatatgtatctgttgttgacgctgcgacacttgcagctgcgacacgcgctggagctacaaatgatgcaggactgggtagtggaacgctgcaaccggctttgcgacgcgctttacttttgttacacgcaagcccccgagacgcggcagactttcgtcacgctggtgcgtgggctggaacttgcgcggcaacacagcagtccggccttccagccgatgctgtacaatctgttgcagctactgacgcaactgcacgaggccaacgtgtacctctgcccgggatatttacatttcagcgcgtacaagctgctgaaaaagatccaatcggtctcggacgcccgcgagcgcggcgagttcggggacgaggacgaagagcaggagaacgacggcgagccgcgcgaggcccagctcgatctcgaagccgatcccacggcgcgcgagggcgagctttttttcttctccaagaacctgtacggcaacggtgaggttttccgcgtgccagaacagcccagccgctacctgcgccgacgtatgttcgtggaacggcccgaaaccctgcagatcttctataacttccacgaaggcaagatcaccaccgagacgtatcacctccagcgcatctatagcatgatgatcgagggcgcctctcggcagacgggcctgacacccaagcgcttcatggaactcctcgacagagcgcctctgggccaggagtcggaacccgagatcacagaacatcgcgatttatttgccgatgtttttcgccgtcctgtgaccgacgcggcttcttcgtcgtccgcgtcttcgtcgtcgtcctcagcatctccgaattctgtttcgctgccgtctgccaggtcgtcatccacacgaaccaccacgcccgcgtccacgtacacctcggccgggacttcttctaccacgggtctcttgctctcctcttcttccttgtcgggatcgcacggcattagctccgcggacctggagcagccgccccggcaacgacgccgcatggtcagcgtgaccctcttttcgccctactcggtagcctacagccaccaccgacgtcaccgaagacgacgcagcccgccacccgcaccccgagggccggcccacacacgcttccagggacccgacagcatgccgagcactagctacggcagcgacgtcgaagacccgcgggacgatctggccgaaaacctacggcatctctgaacgcggtttttcctctttttctacgtgtctgtctcaggacgagacgtcgatatcaataaaaataccgtcgacgtggtttttttaacagtgtggttttctttattgactagcggagtacacagtttacgagtaaaaaagacagggaaaggttatataaaatgctgtattatatacaaaaacatgcacataaacagacgggaccaccgtgctcgtcatcctctcctcaatcagttgttcatgtaggcgtgtggcggggtgaggggcggcatgccgttggcggcgccgggaataatgtgccgtcgaccgacgtcgcacaccttgaaacgccgtcggcgcacgcagcggtcgcaggacgggatatcccagaggaagcccatgtaggtctcggggtcctcgtcgtgaaagcggtaggagagttcaaagtggtgcaacgagcccgtccgagctcgcagcttctggcgaacaccctccacgtcatcggtgcacaacgacagtgctgggctctcacacagggcctgaagctcctgcggccacaggtgcgtggccaggggcgagtccgtcgtcaccagtttgacgcagtgcatcaggttctcggtgatggcgtcgtacaggcgactctcagcctcctcgtgcgtcatcacgtttcgaggcagcgacagctcgtcgtcgtcatcctcgtcaaacatgatcatggggtcaggggtttttttgggatgttgacaggtgggtgtcttttccagacgcacgatggcctcacgccggccgctgaaacggtggtttcggtgtcccttctttcccatgacgcaggtgaacataaccacgtcctcggccaaacggtagacggcgtccatggcggggtcgtagccgtagacgacgccgaaagtgtccaccaagacgtactggcgtacgaggaactctttgcgttctggcacctcgtggcccagcgcgcccaacaactggtggtaacaggtgatgcgcggcacggtacggatcatgagctccatggtctggatgctgccgcccgcgcggacgacgctgaaggatgtttccttgaacttcataacctctgtgttgtgggtccagaaggcgaaatgggtgtcgggacactcatcgaaagggtcgtcgatggtgtaggaagcgtagccccgcttggtcacctcggccgacaggctctccacgtcaccgcggtagagcatgacggcgttccagtaatcgtcgtactgcaccatgggccgctggtagtcgcgcatagtgtggaagtggtcgcagtgacgaaagccatgccgcagaaagtccttcatggtggatgccagctcgtagacgcagtcgcgcaggtcatcgtagcagtagatgccgccgcgctgcccgatgagcacgatgagttggtagcgcataaagcccggaccctcgacgaagccaaaggggtgcaggtattcctgacagcacacgtaagcacctggtggagaaataagaaaaatccacgcacgttgaaaacacctggaaagaacgtgcccgagcgaacgtcctctttccaggtgtcttcaacgacgtggggcttaccttgcgaacagacggtgcccatcttgcccacgaagggccccagggcgttgcgcgaacggagctggatgaagcagcgttcgggccaggccacgtgcagccgggtgccgcattcctgctccagaaagtcgttgagaccgttaaagtccccggctcgaatggcgatgcagccgtaggccatcagcgtgtcccgtaggtcgtccatgacggactcctctaccttcgctcgccgacgctgcgcttctccagccaccgctgcggtcgacagactccttcgtccgccttcggagaactacggcgcggcggcacggcctttatagacactatcagcgttgacgtcagacgatccgatgaacgtcgttttttgtgctggaacttccctcgtcccgacaaatgtagcggaaatcttcaagcaaatcgcgacgaagtccgatgaggaggatgcaaaagaggctgagcaacgcgatgctgcccgccgccacagtacatatgctcaacaacgcccagtgtcccaacgcgcgacttttggctcggagcagagccgaacggcggtttctccacatgacagataacgtggtccagtacgtccatcctttgcattccggcgtccagacgggaagcgttgtcatgttagttcccgtaaaggtcgtgttttgtcttgttttgtttctcatgagtttaacagtcctttttagaaaccgcgggcacatgtcttgtagaaagatgtaatcactctccgcgtatgtcgctagggttgacatcacagtggtagtgttttccgaagaagtgacgttgtcagtgatattgtcagtgacgttaatttcttcccagtgtacggataactcgaacggtgtcgtatgcgccaccgctctcaacacgtaactacggccggtgaggttaagtgttagttgtcccacggtcacattggtgtcatttgtaaaacacgcgatttctccgcgaacttccgtgacgttggtttcacgggtctcgttgagaacacgcagaggaaaccagccttccagatgatactggaaaccaaacgtaagcatgacgctatgccattgtctccgtggttgccgaaacgttacgttcagaggcagtttggcttcggctcctgcgcaaggcccgttatagatttgcgtgtcattgcgcgtacagtttaaccggcagttcatactcgtggtgttagaagtgatgttaacacccgtgccgtggtacgtgcatcggaccgaaacaccgtgtcccgtgctccaaaacagcgtcaacaacagccacacagacacctacgtggagacgacacgggactttttattgacggagactcacgtttctaccctcccctttcccgtaggtaaaaacccacgtttatcacacacgttgtttttacctgaaacccgcgcagcccgtggacgcgacaaaaaaccgcggcactagaaagaaaatgaaacaagtatgtttattaagcagcatgtggggctaataggggggataactgaggtatagcaactatgaaaaaatactacaaaaaaaaaagctgaacatggtcatctagcagcaaagttctccttctagaccacgaccaccatctgtaccacgtcgccctccccggtcgtgtacatcacatccttcaccacgaccggtggcaacggcggcgacgaggacaactcgctctcgacggaggccgggacgacagaggacgggggggtggtggcggcggaggacggaggggtggcggcgacagcggggtcttcttccgacacgggcgacggcaggctcggcggcgcggacagcacccgttgcgccggggcgtgagaaggctgagccccggtggcctggatgtgggccaacgaattggctcgcagcgagtcgcgatccacgaaggtcataggaattttcccttcgcggatccgccgctcagattccaggatggcgcgcacgtagctgttcaccgacttggcaaaagtgcgcggcccttccgtattcttgtcgcgacgcgcttccagcacctgcttttcgtagtccagctggtggaagaccatcaccaggtcgtccatagtgtgcgcgtgctgacggacgtgggagcgcacctccaccgggaacaaagcgttccaatactccagcacgatggcaccgtgccagaactgcgccatgctgggcgccaggaaaaacaggataccggagtcgtaggcgaacacgtcccacttgggcgtcatgaacaacaccagctgacgcgtgggccgcaccgaagcttcctcccaggcctcgatgaccccgaacatgatgagctcctggtccaacggggggcagtgtcgctccagccaactgatcttgctcaggttcatctgcagaaactcgtaagaggggtcgcagatgcacacgtagagacccgagtcgtgccgcagcctggctccgcgcttcatcagtttcctcaccgcgtagcgaagcgccaccttgcccaacgccgacgcctggatcagtccccccacgtccatctgcgtctgtcgccactcggcctcgtccagcaggctcgtgatagcggaagtgctatgcgtggtcgtagtcatcctttctatccttctctatgaatagcagcaatagcggtaaagtcccttcttatactatcccggagtctgtggttttttttgtttacccctgcttactggtgagactgctgggggccgttgtgctgcagcagctgagctcgtcgccgccgttgccacaggaaccggtgcctccgcagggcctttttgagggcctcgcaggcttctcgcgcaagtcctgagaggccctcggcgtcgatggggttcacctcgggcgtccgagcctcgttttcttcttcttcatcctccctttcctcctccgtgtcctcccgctctgtgtcctccgttacgctctcctccccggcctcggccaagagcgcagccaccaagtccacggaccgctcggtctccgagttctcaccgtcaattacgccatgttggcggcgtaaccggtgccgagaacgccgggtgagcgcacatgcttttttctttcttaaccaaggcgggagaggatcttcaaggcgttttcgctggatccagcggtagctaaagtaccaaaaggccagcaggcccacgctacctaacagattcacgtagactggagacataattaaagaaagaagtgaaacccgcgtgtgggtctcacgtcgtcttgaaacaccgtcttatatacatgaagatgccggacatgacgcgcccaagacacgtggggtttcccccttaggggacccggtttcttaagatgtttttcatcttcgcacgcgatgtactacatcaaagggtcggctgaccgaccgcattgacgcacagtttccgagtacgcgcgtctcggagcacctgacggtgagccacccagctcacgcggataggggacaacactgacgtgaggggcgattcacgtcactgacggctgacgggaataagacgggtgagggatttccacctttttcttaagtgtgactctccttacggtaaatcgcacctgtgacctcttaacccctcctccctggtacccaataacagtgaaaaacacacaccacacgtcacgacaccgatcgattttctttattcttagtgtgatgataggtaagggcactcgtgaggatgtgcagttatcattatcaagccttcttcaaggcgtagtgatgatcgttgggcagaacccccaagctcctagcgatctgggaatagaaggaggagaacgaccccagggccagaatgcccacagtgtacatggcccaggtctccagaccgaacgtggcgggtcgcagcttcagatggtaggccacccgctccgagagttgtgaatgctcgttcaggcaacaggactgcaggtgggtgagcccaaaagcgctttcgtttacgccgcgcacgtgcaccgtctgggccgggcaatcctggtgttgcgcgcgaaaatggtcctgacaggagattccgtctacgtggcggcgcgtgttgttacccacttcgatcagcaacgtgttatcggcaggatgatgcgagaacgcgacgacggtgttgctggaggtctggcggcagcagtacacgtcgagcgtcatgagggccatgtcgccttggtggtacacggcgtacgcccaaccctggaacacgagcggacatcgcggaccgtgagcggacatcgcgccggcggttgttaccgtcgtctcggcaggagaacacaataaactcctgatcctcatacacaggagtccaagcgtcagaattaaagtccgcggagccataaccgcgcaagtgaagccgatacgagtgttgctgaatttgttcattctgccgactgttgctcacgagcgttcggaggcggtgccacaggctgttggccattaaaaagtcctggcccgaatgacgacgagacagagcccgaggcgaagaaaaaggcgcccgtcatgaagacgtaggcaggggaattcccatatttttatggcttcttttaaaagtctgtatccgactccatccggcgcttttcccaaaccgtggtctcctcgtcgtccgactcggtacccaggaggtggtaagtcttttgccgcacgtagaaagctttcaacgtggagcaaaaaatgagaataaagaccccgaaaacgaaacaaaccacgccgatcatgccgatgcagacgttcatgtcgacgtagccggcggtgctgttggcggtgcggcaaaagagtgtcatgtcgtgcgtgcacaaaaaacaacacacaccacaggccaggtcgtagcgtagttattattccgtagcagcaatgatggtacagtcaagcacatgctctatttcccgttaccccgatgatgatgatgatgttgtccccgttgcagtggaattgtcccggttaatcaccacggtgaacaccacggccaagaaaatgatccctaatatagcgaccactaagagagcaaaagtccatttccagccgttgtcaaagtacgcccccgtggtgggatgcatggtggcgggcatttccatcatatccatgtcgaacgtgtgtcgcggcgacggcgaactaaccaggcagtacgggggtcgatagggcggtgggctgcagtcgggtggtggcggcggtggcgtggaaaccgtcgtcgggcacagacccatggcctgctcgtaggtggggggcgcgtcgtcgtgatcccggtcgcggagcatcggcgtgggctccatgtcggtggcagtgacggcgacggtggtaactgtggtggagacggtaccgacggcgtccgcggctcaccttcgagcaaagagccccttctttttgcgcaaacgacggcaaaacagttctctgggacagccggtggcgcggtaagcgggtgccacgctttcagggtgggtaaaacagtcgcgggcgaagcagtagttgttgcagaaccgcaaaaacccgacgcgaaagaagcccaggagtccgcgcgccagaaagtgcgcctgccgcgtctcgggatgcacgccgaagacggcgccgctctcgttcaccagtatggagatgtccaggcgctgctgcgactccaccggcacggcccgcaccacaaatacctgcagcacgttcagcgagcacgtctcttttaaccagttgccgtgggccggatcctcgtaagtctggctcccgttcaagacgaccgtcgtcagcgcctcattaccgtctcgccagctgaagatggaaccctcgcgcttcatgcacaggcgccacagggccagcaggtcgcgcgccaacatgaactcgcgacccacgtcgccgccggtctcgaagcggacatagcccagttcttcgcgcagcggcgcgtagttgcgcaggccctcctgcacgaagccgcggaaaccggaccgcgacaccaggtacagcgattccaccacgggcgagtagacgtagacgcggccgccctcgccgatgagtacgggtagcggtgggcggccgatggcttcgcaacgactcacagtgcccaccggcagcaggaacttgtcgcagcacaggaaggtcttctccaaacctttaatattgagatgtccaaagtagccgacgcgtaacaggtcgcagtaggtgaaaaaccaaccgttcggccagctgagacgcagcaccgtgccgctgacgcgacgaaccagcttctgcaggtccttgcgggcgtcggcggtgacagagcagcggaaggtctcgttgaccagctcgacagccagcgcgtcctccagcgtacgttccttcatctcgtcgttgatgctctggcggcgccgccggatttcgtcgaaacgagccgcggaggcggcgaccgacgcggaggtcgtccgaacgccctctgtgacgctgtcgtccggccagtcaagaaagctaaggctggcgctgcgccgcctaaagtgtccgatccgcgcgggacgtcgctgagggacggtggctggtctgctggggcgggtacggccgcgggtgtccgcggacacgttagttatacacggaattgagtcacgtggcacgttgccagctgaaaccgccgtcgtctccgccggcgttttctccatcacgggaccgcgccgtgcgcgcgttcccaggcacgcggcccacgctctacccgcacttttgcttcttggtgttagggacgaactcgaacgttacagaatcctcgctgtcgctctcctctttcgcgtcgttaaagtaattgccggagttgcgatccaaaccgccgcctcctcctcctccgccgccgcccgatccacctttggacgtcaggtagctggtgatcttgtgctgctcgtatttttccttggaggaaagaccgtggtcgtgatcaccgccgccgccaccgctgctcattttccgcgtaccggaaccaccgccaccaccgcggtcgtgcttcttgccgccaccgccgccacctcctcccagaccgccgagacccatgggttcgttcatgagatcgttatccagacccgggccgtcgtcgtgcagaccgccggcattggccagcgaagagaggctgccgccaccaccgccgccgccacgcgacttgccgctgttcccgacgtaatttttatcgaagggatcgccacgctggaaaggttcctcggtgagaaaattctccacggcgaacagaccgttgcgactggccacgtacaacagcgtgtcgtgctccgtaactatacgcaacgtgcacggcagtttggtgacggcgcaattgagcagcgtctggtagaagttcttcagctgcacgttgatacgcatgttttttacgccgtggaaactgacgcggttattggccgtgaattccagctcgctgccgttggtcaggatgaatttgatggccggcggaccggcgtgcaccagaatctgcacggtgcccgtagggcagggcgcttttttaacgttacgcttgacgcgggtatgcggcccgatccacttaagcaggtcggccaccacgccgaaatctagatccacgtgcacggccgaattctcgctttcgcgcacaatgtcttggccgtgcacgcaggccgagctgaactccatattgaaatcgggcgcgcacatggagatcttggccgaaaggtccgagatgtcctgcacgtagaacttggtcaggtccttgctggaagtcaggtacatgaaattaccgagcagcggcgtggaattgttaatggtcttgggctgaaacgacttgtcagtgatgtagagacatgagctgttaaaagtgatttttgacacgcagtgactgcgtaccgtttgcaagataagcgacggcgtgggcaagaaggtaaccgtggtgttctccttgagcgcacggatcacagatcgcagctgctggatagccgtcttgtacggcttcagccgcagcgccagcgtcggcggctccgagaggcgcgtcttgcgatccatcccggacagcgtgcaagtctcgactaaggagcgggcgcgagcgagcgaaagttttatagagagcacacacgacgaccgggaacgctgcgaagacgcccggcgtctaataatacagccgcgccgagccagcgggcccccgactaagaggcacagtacttatatactccgaccttaaagcgccagtggtaccacttgagcatcctggccagaagcacgtcgggcgtcatccccgagtcatagtagaaaaccagggccacgcactggtccacaaacacgctcaggttcacggccgccatttccacgtcgttttggatcgccggcgccgcctggaacagacactgcgtcgccttaccctcctcctggtgctgctccaaccacgcgtaattcaccacgggcacgcgcagcggcctccgcaccacggtggggaagtaacactcacggttgggcgggcacaatgaccacaccgtctcctcctcgaacacggtgccgcgcgaagcccacactgacggcgtcacgccccacagatgcgccacctcgtcgtcgggacccaccgccagaaactgacagttgcgcaatccgaactcgagcatgtcggcgcgcagcgcttcccagcgcgcgctggcgatagagagccgcggcaaccgatacaattcgaaaatgaatttgccctcttgatagatggtgcgttcgaaccactcgcagcgcggcaaacccgacttgcacaaatcgacgctagcgcgcaccgcggcaaagtacatgtgctcaaagatgcgctcgatcaagtcccaagaggcaaagtacgtgaaccctaaccgcatgagcgccgtgtgcaagccggccacgccgatgtgcagcggacgcagtttttccagcgcgctctctacccaccattcggacgctgacattagcgcgtccaggcgcgcgttgccccaaaccaccgcctcggtcaccaactcgcgcagcacgctcaaatcaaagtaacgtcgcgtgttccccaaaaccacgtcgggtagatgcagcttctgctcgtcgctacgcgcaaacacgcagcgagccacgttcaccgtcagccgctgcaccggcatgtcacactcgccaaagtggcacgacgccatatcgggactcaagcacggcggcaggcacacgctgtcggccataatcgagtacttgactacgtgatggacaaagaccaccgaggcacggcccttgagcgcgcacagcaacatctttttcagaaaatcgtccgtgttcacgatcaccttggggcacgattgctcgcagcgcgaatactctttctcgaaagccgactcctgacccaggtccgagagccgccgggagacaggccgcccgaacagcgagtagcgctgctcacgcgcacggtatcgcttcattaacacgctaggcacgttgaaagcgtagcaaacccccgtcaactccgacgtgctttctttgagaataaagttaatcacgcggatagcggccacgtcccacatgtccacaaacacacgtaccacgggtcgatgcacctccttctcgcgtatcaaatcgcagtatccccccaggcaacgaatcacgctgttcacatcggcgttaagtcgcgttacgttcaccgacacagaaacgccgcaactcaaggtgctcatccatttgcacatagccgcccaactggcgtcacgcgaaaaagggtcggccgagatcagaaagtcgtactgcggcacgcgatcgaaacccacggtagacatggtgaaggtggacagcgacagctgcccatcgcgacagcgcttcaacaccgattccaacacctcgccttcgaaacgcgcatccagatggaaacgatagatgcgcgagtgcctactgttctcgatagccgccgtcaacgccacggcgatgcgcaaaaacacgccgcccggactctcgtcctgtccgtgcagttggcgacacaccttatccaaacacaaaatggccgcgtacaagccccagcaaccggccaattccacaaaacgcgccgtctcctcggccagcttgggtagatcctccatgtgacgcagcacaaaacggcgcaccgactcatcgcacagctccgaagcgtaacacagtggcgtgcggctttcacgcgcccagttggctttgaaataaaagcgacccaacagcagatcgcaacgcggcgagtgacgaattagacagggaccgtggcgcatgataagctgaaacagcctgaaactgcccaaaccggcactgtgccgcgacacggtgtccatctcgcgccacagcgcgttcctgtcggacggcagctcccgtgccggctcctgtacgccgcaaaagcgaaacttgccccaatagccgtgacaatgacactttttgcccatcaacatgcgcgtagcctgtatcggcggcgatactttgcagagcgaagccccgaaatcgtcctcctcctcgacactgtccagctccatcctggtcgcgccggtcggattgaaggtgctcaaaccgctactcacgcgtccaccgcgactgggcacggcggaaccgctgtcacgcgtcaacgacagcacagacggcgtgccgtcaggagacggcgactcgggacgccaactgacgacgccgccaccactcgtaaaacccgctacacacgctacgccgctcgacatgttagtattttcagcggatgcttccttgtcacccccgggcagcggcccttcctcgagctcgctgtcatctcccccggtagtatcagcgacggcctctgccgacgattcctccgtctcggtttccgcgccgcggctcggaatcctacctggccggcaccgatgtgcgggcaccgaggacacccgctgttcctcgtccgcgtcagccggagtcataagtttacgaggaaaagaacaaagaaatcaggtagatttcaataaagtgagtctagatggcgccgataactacggtttataaagtctgtgtgcgatgtgtttatttttttcttctgtgtctcctccccgtatgctgtcagcgccgctcagacgaattctcgaaagtctcccaattcgacgctaaagttgtccaaacggacgacggacagtttgagttctttgtgtaccaggaacgaggtgtgaatgtcgtcagccaggcaccagcccagcttttgtatgaccccggtacacagagggatctggcgtgggcgcgtgatgcgacggttgacaaagctacagcgctcgcgggcgaactttccgcgtgcaacgtcgaccagggtctgccagtgtgcgatgctggaggtgagcacgtagatgccgggacgtgtttcgggcccgtcatagtcatagacgatgattaaatacacgtattgcagccgtccccgggtctcttcccacgtcagatacatgtctttcggtatcatcaacgcgaacacctccgttttgagcgtgttgtaaaggtagccgcgcatgacgcaggtgagcaacgaggtgatgcccagcgagacggtcttgacgcagcccagcgtctcgaggcggcggtgcagcagatgcgggcccagatccagccactgcagcgcggcgcgcgcggccgaggccgtgtacacgctttcgagcaggcagcgcgtgctggccgagacgttggaggcgcgaatgcctaacaggtagaggctaatgtagaggtgtcgcggcgagtcgcaacccgtctccatgcggatgagcagcgcgcccggctgcgcctcgaactctaccaggccctcgggcacgaagaaacgcgccgtgagcgcctggtgatcggcgtggtagaggtagcgcaccgatatagtatttacctcgcgtttggctttgagcgccgtcactagttcattgtcctcgtcggccgggtcgcgcggccgtttggccaccgcgcgcgcgtccatgatggcgaggcgcacggtagatttcaaaaagttgatagagcagctgcgggcacgggccacggacaaagcggaggcgttaaataccgtgagccaattggagatcggcgcggtggatgcccaggacgtgaccgcgagcgccgtgcgcgccttcgtgggtgcgttgccgagctcgggctaccactttggcttcgtgcgtcagaacgtggtcttttacctcctaagccacgccacggtacagacggcgcgcgacccgctgtacgccgccgagcagttgcacgaacagctggaccgcttcctgcgacaccagcacgacggcggcggggacgaggaccggttgccgttctaccacaacggggccacactgacggctttccagaagctgttgcagaccctgcgcgagatccagaccgtaatagccgaacagagcggcggcaccgcggcagcggcggacttgatcgccagtaacaacgcgtcgaccgagcgccgcggcaagaagggcggttcgagttccgggggccagcagccgctggtccgccgggtgatcacgcagctggaaacggctgccacggaggcgcggccctacgtcaattgtcgcgccgtggccgaactcctggacctgacctaccagcggctcatctactgggcctgcacgctcatgccctacgtgttgtttcggcgcgacaccgacaccgaactggacacggtgcttctgatgcattttttttacacacactaccgttcggttaacggcgatttggccgtggagtttcaaaactacgtcaagaacagcgtgcggcacatgagctctttcgtcagttccgatatcgacggcgaccagaagcccggtgccgaacacatgcgtgacgtcagctacaagctgttcgtgggtaatctgcaggcgcgtgacgccagcggcctcatgtttcccatcattagcacgcgcatctccaccgtgaacctttacctgtcgcccgaacgtatgtttttccacccgggtctgatctcgcgtctgttgagtgaggaagtttcgccacgcgccaacctagacgcttacgcgcgcgtgtgcgatcgcgtgctggaagaccacttgcatacgccgcgacgcgtgcagcggctactggatctgacgcagatggtaacgcgactggtggaactgggtttcaatcacgatacctgcgcggcctacgcacaaatggcgctgatccagccggccagtcagaagagctcgctctttgtcagcgagattcgcgagaaactcatacagatcatctacaatttttacacgtttttcatgtgcctctatgtgtacagccccacgttcctgttcgaccaccggcggcggttgattttggagcagcatcgatccacgttgatcggctccaaggaggaactacagcacgtctggagcaacgtgatactgaacgtcaatacgcactttgcggttcagtacacggaagaagactttgaggcacatacgaagggtgccacggaggcggagcgcgagtacctgtatcgggacctgcacagcaagtggggcgtgcacctgtttaccttgcgtccgtctcgcggcgcggccggcgcggcctcgcctttgcctccgcttgacggcgtcacacgctccgacatcttacgcgaatgcgcgctcgttaatctgaacgaaggccgcgtcaactacgcctccctgctagccttcagtcatcatcccgagttccccagcatcttcgcgcagttggtggtggtaactgaattttcggagatctttggtatcccgcagggcctgtttcaagccgtgggttcgccgcgtctttttgcgctcattcagctgtgtcgtgtattgttgcccgagcaggtgacgctgtaccagaacctggtctccatctacaacctgaccacctttgtcaagcacatcgacgccgcggtttttaagacggtacgcgattgcgtcttcgacatcgccacgaccctcgagcacctcagcggtgtacccgtcacgcccaatgtggacctgctggccgagctcatggcgcgctccgtagcgcataacctgtacaccaccgtcaacccgctgatcgaggacgtgatgcgcagcagcgccggcagtctgagaaactatctgcgacacacgcgactctgtttcggtctggcgcgtgggcgggcgcgcctctcggaggacggcgtgacggtgtacgtggaggtacagggtcagtacggactgcgcgtacctaccacgcgtttcgtagaacagttgcgcgagctggttcgccgcgatcggctgttggccgagaatctgcgcggcttgaatgagcgcctgctgagtgttcgcgtgcgcgtacgtcagatcagcagcgacacagaggaagtaagccgacacgccaagggtcaccgcacggtggcccagatgagcaaggcgctcaaaaagacggcctccaaaatcaaagtgttggaaacacgcgtgacattggcgctcgagcaggcgcaacgttccaatggcgccgtcgttaccgcggtgcaacgcgcgctagccgtctttgacgtactaagtcgcgagaacttggaacgccgcggcgcacagctctgtctgacggaagcgacgagcctactgcaccgacatcgcgcgctagcgccgatgacctggcccgcgggcacgggcgttgcggcggcggccgaagcggatcgcgccttacgcgagttcttggaggcgccctgggaatcggcgccccaaccgccgcgactccgcatgacgcccgacaccgatcacgaagaatcgacggcaggcgcgacgtccgtaccggaggtcctgggtgcgcgctacgaacccgcacacctggccgcgagcgacctattaaactggtacatcgtccccgtaagccaggcgcagcaggacatcttgtcttcgatcgacccgcccgccggctcgacatcggtgtccctgccgccggcctcgccatgaaagtcacgcaggccagctgccaccagggcgacatcgctcgctttggagcgcgagcgggcaatcaatgcgtctgcaacggcatcatgttcctacacgccttgcacctgggtggaacgagcgccgtcctgcagaccgaggcgctggacgccattatggaagagggcgcgcgtctggacgcgcggctagagcgcgagttgcaaaagaagctgcccgccggcgggcggctgccggtctaccgactgggcgacgaagtgccgcgccgcctggagtcgcggttcggccggaccgtgcacgcgctctcgcggcccttcaacggcaccaccgagacgtgcgacctggacggctacatgtgtccgggcatcttcgactttctgcggtacgcgcacgccaaaccgcggcccacctacgtactcgtcaccgtcaactcgttggcgcgcgccgtggtcttcaccgaggaccacatgttggtctttgatccgcacagctccgcggaatgtcacaacgccgccgtgtatcactgcgagggtctccatcaggtgctgatggtgctcacgggcttcggcgtgcagctgtcgcccgctttctactatgaggccctttttctctacatgctggatgtggcgaccgtgccagaggctgagatcgccgcgcgtttggtctccacctatcgcgaccgcgatatcgacctcaccggcgtcgtccgggaaagcgcggacacggcggcgacaacgaccaccgccgcaccttccttacctccgctgcccgaccccatcgtcgacccgggctgccctcctggcgtggcgcccagcattcccgtctacgatccctcgtcctcacccaaaaaaacacccgagaaacgccgcaaggacctcagcggtagcaaacacggaggcaaaaagaaacccccgtccacgacgtccaaaacactggccaccgcctcctcctcctcctcagcgatagcggcggcctcttcttcgtccgcggtaccaccgtcctacagctgcggcgaaggggccctgccggccctgggccgctaccaacagctggtcgacgaggtagagcaggagttgaaggctctgacgctgccgccgttgcctgccaacaccagcgcctggacgttgcacgcggcgggtaccgaaagcggcgctaacgcggcaacggccacggcgccgtccttcgacgaagctttcctcaccgatcgtctccagcagctcatcatccatgccgtcaatcaacgctcgtgtctgcgtcgcccctgcggcccgcaatcggcggcgcagcaggcggtacgcgcctatctgggcctatccaagaaactggatgcctttctgctcaattggctgcaccacggcctggatctgcggcgcatgcacgactacctgagccacaagaccaccaaaggcacgtactcgacgctggatcgcgcactgctggagaagatgcaagtcgtcttcgatccctacggacgtcagcacggcccggcgctcatcgcctgggtggaggagatgctgcgctacgtggaaagcaagcccactaacgaactgtctcaacgactgcaacgtttcgtaaccaagcgaccgatgcccgttagcgacagcttcgtctgcctgcgacccgtagactttcagcgtctgacgcagatcatcgaacagcgacgtcgggtgttgcaacgtcaacgcgaggaataccacggcgtttacgagcacttggccggcctcatcaccagcatcgacattcacgacctagacgccagcgatctgaaccgacgcgaaattctgaaagcgctgcagccgttggacgacaacgccaagcaggaactctttcgcctgggcaacgccaaaatgctagagttgcagatggacctggaccgtctgagcacgcagctgctgacgcgcgtgcacaatcacatcctcaacggctttttgccggtagaggacctgaagcagatggaacgcgtcgtcgagcaggtactgagactcttttacgacctgcgcgacctgaaactgtgtgacggcagctacgaagagggattcgtcgtcatacgagaacaactgagctacctcatgacgggcactgtgcgcgacaacgtaccgctactgcaagagatcctgcagctgcgacacgcgtaccagcaagccacgcagcaaaacgagggtcgcctcacgcagatccacgacctgcttcatgtcatcgagacgctggtgcgcgacccgggcagccgcggctcggcgctgacactggccttggtacaggagcagctagctcaactggaagcgctaggcggcctgcagctacccgaagtgcagcagcgcctacagaacgcgcaactcgcgctaagccgcctctacgaagaggaagaggaaacgcagcgtttcctcgacggactctcgtacgacgatccgcccaccgaacagaccatcaagcgacacccacaattacgcgagatgttacgtcgcgacgaacagacgcgtctgcgactcatcaacgccgtactgagcatgttccacacattagtgatgcgactggcgcgcgacgagtcgccgcgaccgacgttttttgacgccgtcagtctgttgttgcagcaactgccacccgactcgcatgaacgtgaggatctgcgtgccgccaacgccacgtacgcgcagatggtcaagaaactggagcagatcgagaaagccggtaccggcgcatccgaaaaacgcttccaagcgttacgggaattggtttactttttccgtaaccatgaatatttctttcaacatatggtcggacgactgggcgtcggacctcaggtaacggaactctacgagcgatatcaacacgagatggaagaacagcacctggaacggctagaacgtgaatggcaagaagaggccggcaagctcacggtaacttctgtggaggacgtgcagcgtgtcttggcccgggcaccgagccatcgtgtcatgcatcaaatgcaacaaacgttaaccaccaagatgcaagactttttagacaaggagaaacgtaaacaggaagaacagcaacggcagctactggacggctaccaaaaaaaggtgcagcaggatttgcaacgcgtggtggacgccattaagggcgagatgctctccaccatcccgcaccaaccactggaggccacactcgagctgctcttgggcctagatcaacgcgcccaaccgttactggacaagttcaaccaggacttgctgtcggcgctacagcagctgagcaaaaaactagacgggcgaatcaacgagtgtctgcacggcgtgctgacgggtgatgtagagcgacgctgtcacccgcaccgagaagcggctatgcaaacccaagcctcgctaaaccacttggaccaaattttgggtccacaactcctgatccatgagacgcagcaggccctgcaacacgccgtccatcaagcgcagttcatcgagaagtgtcaacagggcgatccaactacagccatcacgggcagcgagttcgagggcgactttgcacgctaccgcagcagtcaacagaagatggagggacaattacaagagactagacaacagatgaccgaaactagcgagcggctggatcgctcgctgcgccaggatcccgggaacagctccgtcacgcgtgtacccgaaaaacccttcaagggtcaggagctggcgggtcgaatcacgccgccacccgccgacttccagcggcccgtcttcaaaacgctgctagatcagcaggccgacgcggcccggaaagcgctcagcgacgaggccgatctgctgaatcagaaagtacagacgcagttgcgacaacgcgacgagcagctgagcacggcgcagaacctgtggactgatctggtcacgcgccacaaaatgagcggcggactggacgtgaccacccccgacgccaaggcgctgatggaaaagccgctggagacacttcgcgagctgttgggcaaagccacgcaacaactgccgtacctgtcggcggagcgcacggtgcgctggatgctggcctttctggaggaagcccttgcgcaaatcaccgcggaccctacgcacccgcatcacggaagcaggacccactaccggaacctacaacagcaagccgtcgagagcgccgtgacgctagcgcatcaaatcgaacaaaacgcggcctgtgaaaattttattgcacagcatcaagagacgactgccaacggcgcgtccacgccgcgggtcgacatggtccaggcggtggaagcggtctggcagcgactggaacccggacgcgtagccggcggcgccgcgcgtcatcaaaaagtgcaggaactgttgcagcgcttgggtcagacgctaggcgacctagaactgcaggaaacgttggcgacggaatactttgcgctgttacacggaatccagaccttcagctacgggctggactttcggtcgcagttggaaaagatccgcgatctgcggacccgttttgcggaactggccaagcgacgcggtacgcgtctctccaacgagggagccctgcccaacccccggaaaccgcaggcgacgacttcgctgggcgcctttacacgcgggttgaacgcgctggaacgacacgtccagctgggtcaccagtatctgctcaacaagctcaacggctcatcgctagtctataggctggaagacattcctagcgtgcttccgccaacgcacgagaccgatcccgcgctgataatgcgcgaccgcctgcgtcgcctatgcttcgcgcgtcaccacgacaccttccttgaagtggtagacgtcttcggcatgcgacaaatcgtcacgcaagccggcgaacccattcacctggtcaccgattacggcaacgtagcctttaagtacttggcgctgcgagacgatggccggcccctggcatggcggcgccgctgtagcggcggaggactcaagaacgtcgtcaccacacgttataaagccatcacggtagccgtggccgtctgtcagacattgcgcactttctggccgcagatctcgcagtacgacctacgaccctacctcacgcagcatcagagccacacgcaccccacggagactcacacgttacataaccttaagctcttttgttatctggtgagcaccgcctggcaccagcgcatcgacacgcagcaggagctgacggccgccgatcgcgtaggaagcggcgagggtggtgacgtaggggaacaaagaccgggccgcggtaccgtgctgcgcctgagtctgcaagagttttgtgtactcatagcagctctgtaccccgagtacatctacaccgtcctcaagtacccggtgcaaatgtcactaccctccctcacagctcacctacatcaggatgtgatacacgcggtagtcaataacacacacaaaatgccccccgaccacctccccgaacaggtcaaggccttctgtatcacccccacccaatggcccgccatgcagctcaataaactgttttgggaaaataaactggtacagcaactgtgccaggtaggcccgcaaaaaagcacaccacccctaggcaagctatggctctacgccatggccacgctggtctttccacaagacatgctgcaatgtctgtggctagaactgaaaccccagtacgccgagacctacgcctcggtgtccgaattggtacagacgttgtttcagattttcacgcaacaatgcgagatggtgaccgaggggtacacgcaaccgcagctccccaccggagagccggtgcttcagatgatccgcgtgcgacaccaggacacaaccaccacagacacaaacacgaccacagagccaggacttttagatgtttttattcaaacagaaaccgccctagactacgcgttgggctcctggcttttcggcatacccgtgtgtctcggcgtgcacgtagccgacctgctgaaaggccaacgtgtactagtagcgcgccacctcgaatacacgtcgcgagaccgcgacttcctccgcatccaacgctcccgggacctcaatctcagtcaactgctccaggacacgtggaccgaaacgccgctggagcactgctggctacaagcccaaatcagacggctacgcgattacctgcgtttccccacccgcttagagtttattcccctagtcatttacaacgcacaggaccacaccgtcgtacgcgtgctgcgaccgccctccacgttcgaacaggaccacagtcggctggtgttggacgaggccttccccaccttcccgctgtatgaccaagatgataactcatccgcggacaacgtcgctgcgtctggcgccgctccaacaccgccggtacctttcaaccgcgtgccagtcaatattcagtttctgcgtgaaaacccgccacccatcgcgcgagttcagcagccgccgcgccgacatcgtcatcgagcggccgcggccgcagacgacgacggacagatagatcacgtacaagacgatacatcaaggacagccgactctgcattagtctctaccgcctttggcgggtccgtctttcaagaaaaccgactgggagaaacaccactatgccgagatgaacttgtggccgtggcgcccggcgccgccagcaccagtttcgcctcgccgcctatcacggtgctcacgcagaacgtcctcagtgctctagaaatactgcggctagtgcgattggacctgcgacaactggcgcaatctgtgcaggacactattcaacacatgcggtttctctatcttttgtaaccgacactgacagtagcgggtaataaaaacaagaggattgttatcgtttttttatgataaaaaaacaacgtgtcattttcacggtgatttattcttgctattatttttccccatgggctgtcagcgtcgggtgcgcgacactgctaccatgcgcaacaggtccagtttaaaggcgcacttgtcgttaaacaggctggacatgcgtgtatatttgctcagcatggtggccagcaccgggtgggtggcctctgagatctcggtcggcaactccaaaacgacgttgacgacgtgacggtgtttttcgtcccgcttgttggccaccgtgggtcccggcgcggtgttagacatggggcaggccgtggggggaggacgaggaggaagtcgctgctaaaccgccacgcgcctgctgcacaatgtggccgccgacgtggcaggcggtctgtttaaccagcgcgcagccccgacacagcggggcgccgtcttcgctttccaaacagctgtcgcggtactcgcccgtctgacagcgcgcgcacagcaggccgtgcccgtgcgaagtgaggcgcaggagacgcgggaccgtcacgccgcgtaccaccacagtggagtcgcaggtgcgtgccgcgcagggcagaatgacgtcgaaagccagccggtgatcgtacacggcgcaagccgcgttgaggcccagcacggctttccagcccacgcgtacgcagcgctgtccaaagagcgtctcggagacgagctcgtagacgcgctgccgcaccacccgctgactgccgcagagcgagcagtgtacgagctcggcgtgcgtgttgaagatgacgctcttttcttgacggtcccgataatagaacatcgagttgagcggaaaattttgctggcagtgtagcttttccttacccaggttgaggcagtgtccgcactgccgacagaccacggccaccagcgagcgcgcgtccagatggcgctcgcacttgagtcgacacagacaccagagcggcaggtcgatgacgctgccgatgaggccgccgcgcagcgcggcgctgagtgcaaagaggacgatcttggtgggctctacgtgacgcgcctgctgtccggcgcccgcgtgtcctaccgccgcagctgccgccgtcgagcctcctccgcgcgtctcgtcgtgcagacccagtgcccgcaacggcaccaggtatcgcggacacgtgtcgcaaaacgtctgcaccgcttgtcgggccagtacgtagagcgggtttccgcagggtaccttcccagcgtgccggcgcaaggctgcgatgaggccccgcagctgcggcgaccgcggctgccgttggtgacaccactggttacggtggtatacggccaaatcagcgcgggcgtcgaagcgcttggcgcgtagtagtgctaggcacggcgagctggtggggtgaagcacgggcagccgaaggtccaccccgaaaaggaaacggtgaaggtcacctagcagcgaggcggtgacaccgtccaacaacgcgtgcagccgctcgggcgggtagagccgcagacggcgcagcaggtagtcggtgtcgtagcgttcgaaacgcagaaaggccatcgtgcggacggccacggtgtgcagacagtccatgctgtagacgtaagcgagaaacacaaagtagggcttggtcataaccatacgctgaaagagcgccgtcaccgcctcccgctcggcctgccgacacaccagccattcgcgcaggaagcgttggtagagacggtcgcccagctcccgattcagaaagcgcttatccgtcacgaagagatgaaggacgcaagaacgtggcacgtgatgcaccagctgctgctggaggaccgccgacgtctgcgccgcaaactgcgccggtggctgcgacgtttctaccgccgcttcctccggctgcagcgcaccgcggccgatcaccagctgcacatggaaatggtcctcgtgaacgcagaggggcgcgaagagacggcgcagagcctggtggaactcatcagtcgcggtgtgcggagcgtgtcggagacgacgactggccatgaccgcgccacagcagagccagcaccagcagaagagccagcaccagcgggcccagagtcgcaaagcgcgcgggcagccacggcccagactgcggtcgcgatggcccggagcgcgctcgccaccacgatgacggtgcccaacgataaccagtccgctccaaggacggcgcgcacggcggagacggcggatgacggtgatgggtcgacacccctcgccgacgactcacgtgctcctccagaggccgacgcgcggaccctccgacgtcctggcccgccgctgccgccgccgccttcccttctcccgccagagccagcaactcctcctcctcttcatcagcgtctccctcgcttgcgcatccgcatcgtcccatacaggcctcacaacgacacagccgccacgaccccgccgccatgggtggcggcggcggccgaggcccggcagcggcgccgccagcggcgaccatggtgggagagcaactcggatgacgaggaggaggaggaggagggggagatgcggtccgagaggaccgctttcccgccgttcgcgtgagcgcggccgacatgcgggcgcgccacagggacggaccgctgccgctgtgactgcttacggtgacgtggttccggaccgccaacgacgtcgacgcggctttcttggcgtacagctcgcgcagcagattctcgtactcgccctcgttttcgggtccgaaggcgatgagctcgatgttgaagaccgacgccgaattggatttgcgcaccacgcacttcgtcagcactccgtaggccgagggcttgatctcctcgatgtccttgagcgtgacgatgagcgactcgttcaccttaagcacattgaactcacctacgtggcgcgccggcgagacgagcttgacgggcgctcgcacaaaacagcagagggagacggcgcagccagtgtttttaaagataaaacaaggcacgtggtctgtgcggctctcccagtagctgagcagatactcgacacaatagaccgtgtctgtcttgagcatggcgtcgcacaccgagtaattgggatttttacagataaggccggcgtcggtgacgcgcagctcgctgggacccaacttgaggatacgccgcgtggcctgcaccagatcctgatggagaaccttgttcatctccatcgcaccgacgccaccgccgatttatttacccggcgccggctcgtcttttccctccaggattccgttaatgtccatgagcttgctgacgatcgccgttaatagttgcgtcttctcacggaggatctctccgtgactgcaggtcgcgcagtcgccgtgcacgtacttgaggaaggcggcgtacttctgacccgcgttcacgaaatttaagcgcgcgtccagggagggcagcaacagatcgtagacgcgcggcagcatcggctcgaactgtaatagcagatcgtcgtcaagatcgggtagcgcgtgcccgtcttcaccgtcctcgtcgtcaccacctcccccctcgagcccaccgctcgtaccagccgcgggctccgcgtcctcgtcgatcaccagcggtcgcgtcggcaccggagaatccacgtcatcctgcacgtcgttttcctcctctccgtcgtcatcgtccagaaacggcacccgctgcttagcccaggacattctttctccgcgtcctcaatcagcggcgccgatcgccatgaatccgagtacccacgtgagcagtaacggcccaacgactcccccccacggggcccacaccacgcttcttcccccgaccagcccggccccgtccaccagctccgtcgccgccgctaccttgtgcagtccgcaacgacaggccgtttcgcgttacagcggctggagcaccgagtacacccagtggcactcggacttgacaactgagctgctatggcacgcgcacccgcgtcaagtacctatggacgaagcgctggccgccgcggcggccgcctcataccaggtgaatcctcaacaccccgccaaccgttaccgtcattacgaattccagacgctcagcctcggcacctcgggggtagacgaactgctcaactgctgtgcggaagaaaccacgtgcggcggcacgcaatccaccgtactcaccaatgcgaccaacaccaccaactgcggcggagccgtcgccagcagtagcaacgcaggacctgccggcgcttcggccgcctgcgacctagatgcggaactggccggcctcgaaacctcggcggccgactttgaacagctgcggcgactgtgcgcgccgctggccatcgacacgcgctgtaacctatgcgccatcatcagcatctgcctcaaacaggactgcgaccaaagctggctcctcgagtacagcttactgtgcttcaagtgcagctacgcaccccgtgcggcgctcagcacgctcatcatcatgtccgagtttacgcatctgctgcagcagcacttttccgacctgcgcatcgacgacctgttccgacaccacgttctcacggtcttcgatttccacctgcactttttcataaatcgttgctttgaaaaacaagtgggcgacgcggttgataacgagaatgtcaccctgaaccatctggccgtggtgcgggccatggtcatgggcgaagacacggtgccttacaacaagcctcggcgccacccgcaacagaagcaaaaaaacaacccttatcacgtcgaagtgccgcaagaactgatcgacaactttctagaacacagctcacccagccgcgaccgcttcgtgcagcttcttttctatatgtgggccggcaccggcgtcatgagcaccacgccactcacggaactcacgcacactaagttcgcgaggctagacgcgttatccacggcctcggaaagagaagacgcaaggatgacgatggaagaagaggaggatgaagaaggggaagaaaaaggaggagacgatccgggccgtcacaacggcagtggcaccagcggggggttcagcgagagcacgctaaagaagaacgtgggtcccatttacctatgtcccgtacccgccttttttaccaaaaaccaaaccagtaccgtgtgtctgctgtgcgaactcatggcctgctcctattacgataacgtcgtcctgcgcgagctgtaccgccgcgtcgtctcgtactgtcagaacaatgtgaagatggtggaccgcattcaactggtattggccgatctgttgcgcgaatgcacgtcgccgctcggcgcggcgcacgaggacgtggcgcgctgtggactcgaagcacccacctcgcccggaggcgactcggactatcacggcctgagcggcgtcgacggcgcactggcgcgacccgacccggtattttgccacgtcctgcgtcaggcgggcgttacgggcatctacaagcactttttctgcgacccgcagtgcgccggcaacatccgcgtcaccaacgaggccgtgctcttcggacgcctgcacccccaccacgtccaggaggtgaaactggccatctgccacgacaattactatataagtcgacttccgcgacgtgtgtggctctgcatcacactcttcaaggcctttcagattacaaaacgcacctacaaaggcaaagtgcacctggcggactttatgcgcgatttcacgcagctgttggagagttgcgacatcaagctggtggaccccacgtacgtgatagacaagtatgtctagcgtgagcggcgtgcgcacgccgcgcgaacgacgctcggccttgcgctccctgctccgcaagcgccgccaacgcgagctggccagcaaagtggcgtcaacggtgaacggcgctacgtcggccaacaaccacggcgaatcgccgtcaccggccgacgcgcgcccgcgcctcacgctgcacgacctgcacgacatcttccgcgagcaccccgaactggagctcaagtatctcaacatgatgaagatggccattacgggcaaagagtccatctgcttacccttcaatttccactcgcatcggcagcacacctgcctcgacatctcgccgtacggcaacgagcaggtctcgcgcatcgcctgcacctcgtgcgaggacaaccgcatcctgcccaccgcctccgacgccatggtggccttcatcaatcagacgtccaacatcatgaaaaatagaaacttttattacgggttctgtaagagcagcgagctactcaagctctccaccaaccagccgcccatcttccaaatttattacctgctgcacgccgctaaccacgacatcgtgccctttatgcacgccgaggacggccggttgcacatgcacgtcatcttcgaaaactccgacgtgcacatcccctgcgactgcatcacgcagatgctcacggcggcgcgcgaagactacagcgtcacgctcaacatcgtgcgcgaccacgtcgttatcagcgtgctgtgtcacgccgtctcggccagcagcgtcaagatcgacgtgactattttgcaacgcaagattgacgagatggacattcccaacgacgtgagcgagtcctttgagcgctacaaagagctcattcaggagctgtgtcagtccagcggcaacaacctatacgaggaggccacgtcatcctacgcgatacggtctcccctaaccgcgtcgccgttgcacgtagtttccaccaacggctgcggcccctcctcctcctcgtcccagtccacgccgcctcatctccacccgccgtcgcaggcgacgcagccccaccactactctcaccaccagtctcagtctcagcagcatcatcaccgtccccagtcaccaccgccgccgctgtttctcaacagcattcgtgcgccttgacactgtacggcagaaaagccggctccaagtgcaagcgccgcggcagcaccatgtgcaaaaacttgtccttgcgcgcggtttcgccgccgggaaagacgggcgacagcacgttggttacagccttgagaacctgctcaaagtacttgtcggtgtgaatgggcacgccgtgctcgcgcacgtagctcggatcttcggctacctcgtagttgcacacggccgacggtggtttccgcgccctcttctttgccggctctcctcctctcctgttgctctcctctaccccgccgccgtcagcgtcgtcgtccgtgccatcaatcgcgtccgaccgggaaaccacgccggcggttacagaatcaccgttgtcggaggaaccctgcggcgccgtccggacaccgggcgccgtcaggacgtaaaagacccgatccccgaccgagggtagctcctcagaacgggccgccagtcgcttaatgacggcaatgtgcggcaggttagattgacggtacaacgagatgtccttagaaagcaccgacgaaagcaccaggtcctcgacacgcacacggtgcaggtacagatcgtcgcgggcctgcaccaggcggcgcaagatacgccagaaaccgcgtggcacgccgtatttcttgacttcatcgagtgagaggcgcgacaggcgcacggctgcttccgagacctcgcgatcctcaaagagcagcgagaggacgtcacgcgtgacgcccttgacgaactcgcaggccgtcttgcgcaccagatccacgcccttcatgctcagacccgaggcgccctccactttgccgatgtaacgtttcttgcagatcatcataagagagacgaagaccttttcaaactccagcttgacgggctccacaaaaagacaggccgtcacgtagtgcgccaggctgggcccacgcgccaccagagcctgcggcgtcaggccacgaaagcggacaaacacgctgtccgtgtccccgtagatgacccgcgcctccacccgccgttcgtccgagccccctgacgatgtttcgagcccctccggtaacgtgctgctctcctccgaatccccctctcgcgttctcactacatagtcttcctgattaaaaaaattgtgcaaaaaacacggctctgaaaaattgtctttgatgaaccgcgccgtgcgctctagcatgtcgcgaccgatgcgcgtgatgctggcggcgatgggcagacacggcatcatgccgttgaccacgccggtaaaaccgtagaaagcgttacacgttactttgagtgccatctgttccttatcgagcagcatacggcgcacggggtcttgacactcgcgcatgcattcgcgcacggcacggcgctgcgaaacccacttgttgagcagttccgaaagcaccgagacgcgcaccgaagcacgcacaaagcggtgagtcacgccgttctctagcgtgacgctgtatacgtcggcggggtccacggggtactcgccacccggcaccagcagggtggagtagcagaggttgtgagccatgatgatggaagggtagaggctggcaaagtcgaacacggccacggggtcgttgtaataacccacctcgggctcaaacaccgtggcaccctggtacgaaaccgccgcagtaccgccggcgccgtgactgtcgttggaaacgccgacgctgccactactgccggagccgacgctgaaaacgccgacgctgctactactgttactgccagagccgggtaaaacgccgtcctgactcgacggcgcagattgcaagggcggcgacatctgaaacatggccgccacagaacccgcgtcgccgggcacggcagcggtagagatgatagcggcgttaggtgacacggcaacgctattcgtttcgggcaccgtcgtacctttgctgtagtggttgggcaggataaaatcgcggcaggcgcactcgtccagcagcgaggtgtagatacggatctgctgtccgtcaaagatgacacgccgcaacggaattttagccagccgcgcgatggccccggcctcgtagtgaaaattaatggtgttgaacagatcgcgcaccaatacggcgtcctgcagacagtaacggcctacctgggcgcggccctcggcattagccacgaaacaacgcgggatgtccttgtaggacaggtcatccttgcgttgccgcaggtaaagctcggccatagtgttgagcttatagttgggcgagttagtcttggccatgcatacggggtacatgtcgataaccaccgaacccgcaatatacaccttggtggcggccgtgctggccggattgttgtgagaagccgagggaaaggcggcggcgtactgccgcttaaaacccacggcggggctgtgtaaaaagaaacggccgccctgcgccgtgggcaacttgcagaagcgctgcgagtccaccttatacaggtactcgaggcgcgtgaggatgtacttcaagtcaaaagagttgatgttgtaaccggtcacaaaggccggcgcgtaccgttgaaagaaaagcataaagcccagcagcagctcgtattcggaagggaactcgtagacgtccacgtctgggcccacctgcccgcaggtgccgatcgtaaagagatgaagacccgagtgcccaaagatcacaccctccgaagtgcagccccgaccatcgttcccgtttgggatcccctgatccacggcggtgtttccccccgtctcgtagcacacgcacgagatctgaatgacaatgtcatcggacttctcggcgcagggaaaaccaccctcgccgctcatgcactcgatatcgaaggacaggcatcgatagcgcggccacgagctgtcgtcgggcacggccaccaggtcagagacatcgcagtcgacctcgatatcacaagtcgacgcgcgaccctgctgccgccagtcgtaacgattcacggagcaccagccgaacgtggtgatccgccgatcgatgaccaaacgcgtcagcggatccacacggacctcgtacacgggaaaaccctgctccagcagatactcgccgatttttctggccatggtccagttgctgatagacacacactgcaaatcgggcacgggtcgcgtcccgtacccgtagatggaggtcttggtggccggcgtgacagacacggcgtatggcgtccgcggctcgggcactagttcgcccacgctggcaatgacctcacgcagcctatcggtgtcgctgtactcacagtaaaagtagctgcgctgcccgaaaacgttgacgcagatactgtagccgtgttctgtggccccgaagaaacgcaacacgttccccgaaggcaccagatgctgacgatagcgcggcgacacgttttcgggcgagtcgaagaagagcacggcgtccgtctgatcgtaggtgtgaaaacgaataggtcccaccacgcgacccaccagggtctcgcgccaaggacacggccaaaccatgtcatgactcaacaaatgtttaatctctcgatagaacatgagaggcagccgtcccgtcttatgcttgatcaaccccgtctgaccgtcgaacatgacgcctcgcggcacgatctgcaaaaactgtttctgtggcggccgcttgcccgagccctgcgcggagccgggctgcgaacgctgacgccggccacccgcgaccgcaccgccggtcacgccgccgctcagatacgggttgaaaaacatagcggaccgtgagaggctgacagcttacgaagcacaatcacaaagaaaatacacatgcagcacctagatatccagtttgaccccgtatatcacaagtctctgtgtcactttttttgtctgttttttttttcttctcctggttcagacgttctcttcttcgtcagagtctttcaagtgtcggtagccgtttttgcgatgtcgcagtcggtctagcaggttgggcttctgtcccttgtcctgcgtgccagtctgtccgtccaaagaatctgtaccgttctgctgcgctcgctgctctgcgtccagacggaccagggccagaagcatctggtaagcctgctcgttggtgtaaggcggagccgccgtggatgcatcagacgacggtggtcccgatcctttgcgaccagaattataaacactttcctcgtaggaaggcggagcctgtaacgacgtgtctttggtgttgcccgacgtcacggtggtcccgttggcggacaccagatagggaaagaggttctgcagcggctgcatgcagagacgccgctgtcgagtatagatcaaataagtgataatgactacggctatggccacgaggatgatggtgaaggctccgaaggggtttttgaggaaggtggcaacgccttcgaccacggaggccaccgcgccacccacggccccaatggctacgccaacggcctttcccgcggcgcccaggccgctcatgaggtcgtccagacccttgaggtagggcggtagcgggtcgactaccttgtcctccacgtactttacccgctgcttgtacgagttgaattcgcgcatgatctcttcgaggtcaaaaacgttgctggaacgcagctctttctgcgagtaaagttccagtaccctgaagtcggtattttccagcgggtcgatatccagggcgatcatgctgtcgacggtggagatactgctgaggtcaatcatgcgtttgaagaggtagtccacgtactcgtaggccgagttcccggcgatgaagatcttgagactgggaagctgacattcctcagtgcggtggttgcccaacaggatttcgttgtcctcgcccagttgaccgtactgcacgtacgagctgttggcgaaattaaagatgaccacgggtcgtgagtagcagcgtcctggcgaatccttcacgttcatatcacgcagcaccttgacgctggtttggttgatggtcacgcagctggccaggcccaagacatcacccatgaaacgcgcggcaatcggtttgttgtagatggccgagagaatggctgacgggttgatcttgctgagttccttgaagacctctaggctgcgccgttgatccacacaccaggcttctgcgatttgcgccagcgcccggttgatgtaaccgcgcaatgtgtcataggtgaactgcagctgggcgtagaccagattgtgcaccgattccatgctggataaatgagttgcattgttgccatctgcacttcttttggttctactatgagtaagattcagactggagcggttggccaaacgttcgagttccaccagagatttttgcttgataccttgccagaacaccaccaaaccaccagtggtttcaaacacggacacgtttccatatttttcatatgtttgattgtatgaagtattgaaaatctgctgtaacttatttatggcctcatcacgtacgcagtccagcgcagagtcggacatgttcacctcttgcttcttagataagaaagtggcggtcattttggcagaagaaaagtgatacgagtcctcggcttcggaacgaatggtgcgttccgaggcttcccagaaagtgagttgacaagtaacattcttctcgtcctgtatatcccaggagatcactgagtccgcacgttcaagaaaagccaccaacctgtgggtctctaacgcagaattcggtcttccaaagtcggagacgatagtgtagttcggaaaaatgaaaaacttgtcggcgttttctccaaaatagctggcattgcgattagttccgttgtagaaaggagaaatgtcaaccacatcacccgtggaagttgcgaaaaaatgatagggatacttggagcgcgcagtagtgatggtcaccatacaattcagattacaggtctcacgatagagccaggtgctgccgcggctgtgccattgatccttgaccgtcacgtaacgggtactgtgggtgttggaataatcgtcgggcattaattgcatggttttgttttcatagctgtccctatgataagccacgaaaaccgtgcctgctataacgcggctgtaggaactgtagcactgactgtggctgttgatatgatgaatctcccacataggaggcgccacgtattccgtgttgctgcccagcagataagtggtgtggatgtaagcgtagctacgacgaaacgtcaaaaccttctggtagactcgtaccttaaaggtgtgcgcgacgatgttgcgtttgtagaccaccatgatgccctcgtccaggtcttcattgataggcttcatcgaggtgcagacgatattacgttcaaagcgaataagatccgtaccctgtgccatagaacacacgcgataggggtacttggtggtattgacccccaccacatctccgtacttgagggtagtgttgtagatggtctcgttaacaccatggctgaccgtttgggaagaagttacgcgttgagagactgaaccggatcgagagtgagcagcagacgtcgtatgagaggaatggtgactgtgagtagcagaagttccacgagaagtagaagatgaggaaaccgcagcacccagacagacgatacacaagttaacgcagactaccaggcaccagatcctggattccatgttcgtcgcgggccaaatccagcagcgatgaggcgcgtcgtggtctcttgcgtgttgcgcggaccctccgggaaacgcccgcggtcgaggaggaggggtacggacttggcagccaaggtcggtccggctccctgaaggcacccgagacggccgcggcggccgttagggtggagggcttggccacgggagctgttggcacgtcgccactctcatccggtctggacagatgcctgtagaggaggagatatagatctttggacttataaagacttccttcgtgacgaagcagcagcggccactctttgttatacgtgagaatcacatctctgtccgggtgcagttcgtcgcgcaggcacgcgatcgagagttgtttcccgaaagtttcattatatagtgcgacggagagcacgagctcccgcacgtgcatccacatctccttctgcagcacgtttaggtcctgacagtccgaaaaattgaaaaaacccatgtacttcaccaccatccactcactgggatacacggtaccttccgcgcatttgaccaaatcgtccttgacgtggggtagtacgcccgcgttgtcgcaggcataggccatgtccacattgtgagagaggggatagcgatcggtacagtgtgtgaagaggggcccgttacacaactcgtagatctgctgacccagtagcgggagggattccacaggcagactcttgtggatcaggttattgaccacatacaggtgctcatcgtacgtgaactgatcccccacgtccaccacgtcttggtcctggtggtattggctgcggtatagaaacccattcatgagcttagagataaagtccagacacaagggccccactaggttgacatcgatgagtttgctagtcagacgctcctgcgttttgatgcaacggatcaccttgccatagcccacctctgagaccttctgcaggtaggcgcgtttgcgcacgttcacctcgcgggtgacgttgtggatgcgggaacgcgcgtccaccaagtcgagagcctcgtgttcgtcgcagttgcgcacccgtaagccgttctcgccgccgtcgccgtcctgcccattcgcccctccccctaccgctttcttgcctcctccacgggcccggccgccgccaccgttattcctctgactgtgagtactgctgttgctgctgttgctggccgtcatcaaagtcgtacccgtccccgacatcgcctcccgtccacgcaggtgaatagcctcgccctcggggccgtcgccccccgtgccatcgggcagcggacgtcgaatctcctcgagaatatgcttgattttggtgtacatctcgttgctttcgtggagcttgttgaacaccgggttgtcctcgaaagcttgaatgctgagggatgtgatgaggtcgatgatcctgttgggggcggcaaagaccgaccccacgaacatgcgctcctccccgtccaacgccttttccccgagcacgaagatgtcctccacgtcctccccgtacagatggcgactgatgccgttcatgagcgcccggcacagctggtgatacacatttagctgctggatggtgatgcccacccgcttgacgataacctccgaggtacgggaccagtaggtaaaatccgacaaggaatatattcgttccggtatatccgtaaacaggttgtactccctcagcgcctcctccgcctcctggatgtagctgtggtaggccgatgaagaagagaataggcttttgagggccgaaaggactccagccaagtgggggatgcgcgttgtcaggtccagcaggtcctgctccaccgtctggatattcacatcggactggcttgacggacggtggaccgctatatggttgcacagcaagccctgcagccgcttgttcagcgagcggccctgattcgggatgatggtcagctcctcgtagcattgggcgcatgtcgtcccttcgacgtacacttcctgacgcgccaccggcgagatgccgcataggcgacggaggagctccagcagctgcgcgcagacctccaggccggcctccggcgccaggatcccgtacacgtagttcattttgcacaggaagcgctcgatgtcgttgagtgtggccagactgacgctgaaacggacgttgtccgtaaactggagctccacggtgtgatggcgatcgcagcgatccaaacggaggacggtacggtagaaggccgcccggtccggctggcgcgagtaggccatcagcgcccgatccagcaaagccgtatcctcgtgcagcgccttcagcagcatctccagatagagcgtcagcagcgaactctgcgtacgattctgcgccaccacctccgggtagatcttccggtacagatacactatagccgccgcgtttctcttgaacggcgtggactccgccagtaacacgttcggatcgcagtactttagacactccagctccatggcgtattcgttgcatttcgaacacactacgcatagtttctgtaacaaattcatctccatgactcgactcgctcacgtacgagacgctgtcgtccggtctggcgccggccagagacatggagtcggtgcacaaataactcgcgggccgctcgctatgccgactgacgttgacgttaatatataacgacgtcgtcgacgacgcgggttctgctcccgaagctgttgccgccgcttgcggcgcaacctcctccaccaccgccgccgccggctcctccgcctcgggcgacgggggctcggagatgaccggctgtgtctgacactcctccccttcctcaggcggcccgggcgccgacgcgaatgtcggagtttgccagcgcggcggcggtctctgtctctggtgccgcggcgctaaccttcggggctgttgctgctgttgatgatgcgacgccgtctgtcgccgctgttgcggcggtagctgatacggtgtcgcctggtgctgctgtgtcggtggctgctgttgctgctgttgttgcggtctgaaaagcggccacgggggctgcgactgttgctgctgttgttgcgatgctcgtggctgcggcggccgttgtcgcggcgtttgctggcggttacaaccggctgcgtttggccggcaataacccgctgcccccgccgcccccgctgctcccgccgacgccgccagcctcgtcttcgccggcgttcacgagaaagcagccacctcccgtctcgccgggcacgccgaagcaaatggagttgcccgcgacggactcgccgagaagaagaccgccacccccgacgccggacgccgcgccgacgccactgggcgcgaagagcgccgacaggtcgtgcacctcccccccggcggcgtccgttaatcgctgggcgtcggcgtccagcacgcgtcgcaagttctccagcgaaaagtcctccacgccctgctcctgcaacgcggcaaacttgtccatcagcgacgcggccagcgcctcgcagccatccacgaagaagagcacatcgtcggacgcggggatctcctcgcgcacgctcagaatctcgtacacggccatcacttcggggtcgcaatccaagttctcggcgtccagcgccagcatgacgcggttttttataagatccgcgtcaaaaagcacgttctcgcggcgcgagcgtttgatgagcacgtcggccagacgcgtagccaagaggtagcgctggcgcatgaaacgataatcttggccgctcatagagctcacgttaaggctgcgttccacaccgttgcccgaaaagtagccgatctgcccaaactgatagatctccttgctgttgttgatacccgcatacttttccacgctcacgggcacggtcaccaaggaacgatgctcaaaaacgctccgtaccaacgattcacgcgccacagtggcggccatgggcgccggcacgcctgcggtcttcaagcccttgacatgcaacgcaaattcggcgggcgacgagaaacgcggactagcacctaacacgtgaggaaactgcgcgtggttctgcgtcgttaagcgcgtcgtcaacccgtgcagcgagccaatgtagtctttgaagccgtagtagcagaggaatttgttatggaaacggctttccacgtaactcagcacacagtctggcgccacatccagcagatcgtgctcctgatagtcagccgtcacagccaccagaaatttgacgaaagcattgaactcgcccatgtcacctatgggcacattcttgggcaacgcgttggaacagaccttctgccaaaactgtaagcaggggagaccacattcaggaaagagtcgctcgtgatgtcgatacagcagaaatcccaagcagcccttagccggattacgacgcggaacgtgatcgcggcgaaaaaacacgctacccgcgttgcccttgcccgcgcggtagatgggtcggtttttcactcgcaccatgatcaacgtgggtaccgacagccgcgagagcttgatctccatgggcaccacggcgtacgtgccctgcgcgtacagcctaaagtccagcaggcggtcgtgatccgaattcttggacgacttgatctgcttggtgaagagaaagcccttgcgcgacgacgtggtggagaacgcgccgtgaatggattgaaaatgctgcgtcatccatttggataccaagttggtggtcaacggattgtccacaatgtatgaggtagcggtaataagcgccacgttctggatcacgtaaaagacggatctgaaataggcgtaggccagcagcggctggaaggccacggcgtagggattcagatccaggttgaaggcctgcgtggcgcccgccacctcgtcgcggctgctcttgaggcgcacctccgaaacgaaacccagggcctcgtcgtccacaaacttgttgagcgccgaaaagacggccacaaagtcgcttttgccgtgcgcgctaaaggtatcctcgcccgtcacggggtcgatgagccgcatcttgcggcagtaatccaagatgcgattgagccgataggtacggtccacgctagcgcccagcatgcgaccgccgcgccccatcattcccccggaatccccgccacccccaccaccacgaccgccgcccagaccgtcgctcgggcccccgctcacgtcccgtccaccacccccgccagcaccgccgcccggaaccccgtcgtcacctttgccgtccaaacccccgtccttggcgtcgacgttgtaacgccgaccgaagctgcccaaaatatccacgtcgttgagaaaacgcgactgcacggtgatcacgcagggctccttcttgggctgcttgggcaccacgggcaagcgggtgcgcacccgcacgaaggccgtctgataacacgtgtggcaacaagtacccccacaggcctcgcacagccccgcggcgcagcccaccaggtgattcgtgagcgtcgacgaacccgacaagcccgtgttatacaccgagacacgatttagataccagacgaagcccgaaactagctgcggacacgtgccacacaccaacgccaaatgctgcggcccatagcgttcgtccttgagcggcgcgccttgaaatttgagcaccttgcgcgcgtcgttgtagacgtcttcgcaggccgccgacaacccgttggtgaactgaatagccttgagcaacgtctcctgactggccgtaccgccggcgctgggatgccgcgccgacgactggagatacaccagcctgtgctggtagagcaccgaattagcgctgaagaccaaggcggccacgtgcgtcgagagatgcaacttgagctcggtcagcgcgcggatcagatcgcggtgatcggttgcgttggtcactaaaggccactcggaaaagagcatagactcggcaggttggtaggccgaatcgaaaaataccgaggcaaaactgaaggccaactcgcaaaccaccgcgtcactcagcatcagatgatccttttccagactgctgagtcgctggctcatgtaccccaagtagcgcttatgtggcgccagcttcaccgactgctgactgtcgtgcacaaactgccgcaacgccgcctcgatcagcacacgcggctccgagaagcgcagcgattgacaccatgacgtgtacacgtagtagaaaagcgtctcgcttacggccggcacgtagagccctcgcgcctccacaaaagcgctgcgcgcatccagcgagacctcgtcggcttcggcgtcaagctgcagcgaattaaagagcgtaggcgggtacaacggcacgcgcaccgcctcgccgccgtacagtcgcaccgtggtcgcctcctccacgcatggaatcagctgaccggcaaagagaaactccttcaagccgttgcccaccaccacgtgcacagtcgtctcggacgcctgacagcccaccgccgcgcacaacgccgacagatcggtaggcacgcgatccgcctcgggcgtgtaggcctccaacgcgtacttctggcgggcgtcctcgcacaaccgatgcacgtctccgtgatcctcggtaaaagccacgatgccttgcgtatgatgaaagtagagcgcaaaaggacagaaggacgtgactttcgtgagcaccccgccgtcgtaacaaagcacaggcgtgcgcacagagacgccgaaatccgcctccaccgtcagccccgccaacagaggagcgatcaccacgctcgaggaacggtcgcatagcgagagagtggccagaatctcctgcgtttctgcgttcaacctgctgaagtagagaaaagccgcgggccccaccggcgctagcgcggttagttcctcgtggctcatggtggatgaacggaagacaatggctacgccgccactgagtgaattttataccaaggaaaagttcagcacgtcatgtttgacgcacgacgtctgatacaccaccgtggccaccactgcggtctggctgcggttgcggaccaccaaaggcgacaaccgcaacgatcccagcaattcgtaagaaaagctaaccgttacggtcgggcagcctctcgcagccagaccgctagccgacgcacccgcccgcgaaaatagcgtgatgttcgggacggcttcgcgtcaccgcaaactaacgtcggtagtcgcgcacgtcgtttatcctcagcacaccgtccgatcacaacccgttttcccactcagtcgcacaagcagcacataaaaaccccacacagtgcacgtgaaaacaacgtccctagaaaacggtgttttctgtcctaccgtcaccgggccacacaggcaaatcccgagcccgatccccgaaaacaccgtacggtgtttgtggcctccaaaatcacatcagataacaaaccgtgaaaagtcacgtttcacgaacacggtgtttttaaatcacaaagaaccacctgacggtttacaagcagaaacaccgcaccacggtggtacaagcgcggtggatctggtctcgcaacctcaatcgccgctatcaccaccgactttcgctgcgctccgccgacaaaacgccgtataagctacacaccccaaaaacccgcacgcctatgggcgccaaacgtgtgtattatctcaacgtcacgacacgacacaaacagcgtaacgtggtttcccgaacacgtacgcggcacagacccccgacacgtactcgaagaccttacagtttacgagtcaataaaacaggaaaagatccgaactttaaaattgtgtatttttattttcccatccccctctttttaccaaaaaacacatttttcgtcttgtaaaaagtaactttcgcccattgccatgaaacaccgtgatggggaacggtgttgtgtgtcgactgacgtcactacggcgatcagtatcgacgtcgtgtatacataacggtgcccggtgtttttattcggggcgttgtcgcgtcttgatgtaatgtaacctgaaaccgccgtgtccaagaatgcggaagccagcgtgtaatcataacggggttttgggtacaatctgacgacatctggcggcgagcgtacaccatcgaatgtggcgatcgccggctctacgtcacaatgacgcaaaaacacactgtaaaacacgcgtagacagctttcctggtcaacgagcgccatctggtgtcggcataagaacaggcatcaaccccgtggccggcgaggcggtgagcacttttgctggtcacgtgaccatcagcgcaggaagcgaggcccgtagaaccgcccaagaggcggtgccagatgccaacgtcataatcacaaggtgatttgttacgtcacgcgcgcgcacgcacgcgcgcgcggtagaatacagcgatccctagtgaagccacacccattacgtgtagccatatccgcttacgtatacagccacacccctaggtacgccaccttatctaccaatcatagaaacggatatacaatgacccctccctagactccaccccttgtacggaaatttcagataggtggaacccgttagggttccaccgtcctcggtgtacgtacaggcttctccgtctaccggaaatatacacctgctgacgtagacgctactcccggatacgcgtcataagctactggaccctaggggggagtgtctacagggctacgtgcacgcccccttacttagggtatccgcccccttcctctgttttggcctagtaaacttaacgccgccgcttctcacgtgacccctggcaagcctacgtcacactcgcgtgaccacacccactccggatatacgtcatcctgtggaattccggacatacggtgacgtagcgagcgtagcgagctacgtcacgtatgcgtacgtcacctccggcggaaatcatctctgatgacgtagcgagcgaagcgagctacgtcatcagtccgttttacgtataccgggtgctaggcgacgccccgtaggggcggagcctagcttccacccctaggatgcataccctatatagcataattcttctaacgaaacgttctacgaaaacggactggcggaacgggaaccaccgtaacccccccccctcacccccccccttctcctccggaaccggggggggcaaatttttaccaaatttgggcaaccatgttttccaatgggacggcgtttccgtgcgcatgcgcagtcggggcgaatttttggttgtcagggcgttgccacgcggattatgggatgggggctcgagtgcgcatgcgccggggatgccgcatggaaagcctatatataaggaggggtgaaccaggggccccggtgcgcatgcgcggaccaggccccgcgggagggtcgccctgcgcatgcgccggtaaaattccactgggtgtgtgtcgtgcgcatgcgccagtatttttccactggaggcggtcagtgcgcatgcgtcggtaaaattccactggatgtgcaccgtgcgcatgcgccggtatttttccactgggcggccgcacctagggagcgcgagccccgtgccgggcatgggccgcggcggtggaaaattaccgctccgcccacctaggcggggcatcttaaaacctataaaacccggcgtacccgccgccccccggcgcagtccgcggcagggttccggccgtgctgcggtccgcacgctgcgcccgctcccgcctgcctcccgccctaccccccaccctccccggccgaggcccggcgccggtccgtccgcgggcccgtcccaccgccctggagcaccatccggggccgtgggccgggcaccgggcgcggcccgctccggacctcggccgggggtccctcccctccccccgctcgacccccccatccgacggcccggccgggctgggacccccgcaccggggtcccggttcccgtccgcggcccggggggacccgagcgggggcttcccacccccaccccgctcctccccgggctccggcccgggatccctcgctgctcccggcgacctccgccggcttcccggtccacccgccgcggaacggacgggacccggggtccgcgcccttcccctccccccacggggggctgggtcacggaccccggttcctaggctcgttccgcggtgggcgaccggggatcccccacccagctccccttcccggcccgccccgctggcttttgggcccctccgggctttttttccggctgggggtcgcggcgctcggccgacgacgacggtaggtgggccgggtggacggtggtggggacgggcgacgccccggctcgacggcagtcggtcccggaaggttgggggctgggggcccggtcaggagctccgggagcggggtcgaccgcgacggcttccgggtctcgcggcggctccctctcggcggctccggttgggctcccctcccccctctcgagggtccggccgccagtcgtgaccgggggtccctcggcctagccgccggctctcggtccgccttatcctgggcgttggccggtcccgtgacgctcccctcccccgctgctccccaaaaaactccgcccgaaccgtcgcggcttgctggccctgggcgtggtcccccactcccctccccccatcggccgcccagccggggtcggcgcctcggaccccaccaggctgtggcgtgtgtgctggccgatgcggcggcgaggttgggtgtggccggaagcgctcggggtcgacggtgggccgtcatgacacctcaattgccgtcagtacgcccctccacaatcaccgtccctacacgatgggcccggcaggtcacccaacgttggttcaggcccagtcgggtttttccccggcacaaacgcacgtccccgtgggctccacgcgttttccaccctttcctggaggggtccggaacaccgtgaatccgcggggagggtctcggcacgggccgaggagaccacgaccgtcccacccggcgtgtcgacccgtccgagacccgggaagggaacaggccccacccttttttttcccttctccgatttgccgtggaaaacccgtgaaccgatacgggtacagacggccgaaaaaattcgagacgacaatacgacggcagggcgtgattttcttccccatccgacaaaaccgtgtccctcaaaattccccacctttctctgttcaaatggccccgaaactgtaaaacaccgttcgaccgcaccccaaccggcgccatcttggtgaccttctcgacggttctctcgctcgtcatgccgttctgagctccgacatggcggacgagagaaaatggcgtcgagagcataggagcgttttcgctccaggcgggtaaaagaatagcacgataacttttctgtgctttttttgagacgttttagaagagctttttttctgctcagagcgaaaaaatgatagccctgaaaatctcgacgagtctggccgagcggcgccatcttggaggaggggcgagtcgcgggcaccgcctcggtaccccctggccgaggcgagtccgcggtcgccgcctgttccgtgatgctacctagagggcgccgtcgaggcgactcttcctgttttcgccctgagggctaacggtcgctgacgtcaaaccatctcgtgctcgctgagtcacatccggttgttgacaagcgatggaggaccgcacccaaagtgcgccctctagtcatcgcgcctgaccccttttataaactgctcgaagaaaagaacaccttatgtgaaaaaatacagaatgatgacaagttcatccaacacaaccgctcaacaacgccatatctatcagtgtccaaaaactatcttctatcctttgaaactataaatgctgcctatatacatatttagtatccaagactcttaccacgtagacgaaaagaagtgatacaatgatcttgacgtgtatcgtctatatcgtgctagatatattcagataagacgcgcaaaccatagatttctcatcagtatcatgaaagacctatagctctatatacgaacctagtcattttaggacagccgccggagaagccgacgagggatcgggcgggtgcagccagaacctcacgcccgatcccgcctccggtaggcgatttgcatctgtttggtaaaaagctcataagtctgtatgtgacctatatatatattatacgctatgtacaccgaactgtcgctgttgtataagaagaaaaaactctccatatttatatcgtctgaatttttgcttgatagacacgtgtttggaactctgtccccccacgttttcactgtgtataacaaaaatatgtgtttctcaaaagatcttgaggtgtttgaaaacgggggaaacccgcgtttgggtgcgctaagccccggactgggacgtagccggcgtccggcacctatatttttctattttttttacaaaatatatgatgaaccaagaataaaactctagctctcgtctatttttaatatgctctacttagaacctttttaatgacagaatgaactccatgttatacgctctttatatagtttctctgcactaacctttaaaatcgtatccttccctgttgtacaaatcatcttttgatacacaatgatgacctgatatccctccatatatatgatcggatattattccgttagacttgtcctccttttttttcctcatctcctgtatctggagatatatgttgaccaccaccgccatgaccaccaaaaagctagccgtcacgactagaaatgtgtaggattcggactttccgttcgagaagaaagagaccgcgtctctggacgctctttttgtcggtctgaatcgacccgggatacgtaagagagcggccctacatcggggggcgctcgagaccgacgacgttccatctgaccagaaaaaaaaaaggcacccctcggtagcgacctctcaccatcgtttgcccgtccgcccgtccttcgtagccatcatcatcatctcaggctctatcggtaccatcgttgtcatctgaaaaaaaaaaactgcctcacccacctgcgtaaaaacaccatctttccggaggtgcggtaagacgggcaaatacggtcgtgccgaggcaaaaaaacgcaccatcgacaccacaccctcatgagcaccacctgtcggtgttggtcgtcctccatcgttctctacgaacatctcgacgcccgggtgacggacgacggcaagacgtcccggagaagacggtgttctctcgggcggtacgctctctggatctataatatctatagtagctaaacgagactgtgagtacgacgaaccacatcatcttttttttatgttgctcctttagaaaatgacttatgtcgacgacactcggcatcagccatctcgtgaaacacgctcgcttttcgtctctccaaggaacactgggtccgctgaaagggaccgtgtaccgaccaaagcaaaaaacacacacgtagtaacatgatcaaccacgtctgaatgacacgaaaacacaatcgtataacgctctattcatggaacgaacttggaataaaaaaaccatcgcaggccagaggctaagccgaaaccgtccggggaagcgggcgcgagttttccgacttagtctctggtgctcgttgagcctctttttttttcctgattctctgaagaatcaccgtcacagccctatgacgcgaaatcaattgctagaacataaacgttctcaacaggtatgaaatgaacaaactagatgatgctataaccttatattgtgtgtatatagataggtgtgaaatttgtaggataaaaagtgtcgttgtatgatgcacaacgatcgtgaaactggagactgtagctctctaccgaatgcaaatacacaaatgacatcgattcccgtccccacataaagaaatgtgctttactgtgaaagaatgaagaagattcttgttcctcgtacgacggggccctcgctcgtcgtacctcttcccccctccgggagaggggacgtcggggccctccgtcgcaccgggccgaagccagtgaaatgtttactacactgtcatcagaatatatgatgtatattatttcctccaaactcctcaccatagccaccaattcgcatcacttaagaaagtagtagcaaccgcggcggcggcgaccggccggtcgtcgtctcctcgtcctcaaatgttgtacatgtgcagaaaaatgtgtaaatacgtgttatttatcccatgcgtcttgtacatagatatatgtttttatatacgctatttatactttatatatccttttgcataaccatagacagtcaaggattttaatgatttgctcatccgcctttgagccatcgcttaggagttagttcctctatgttctcggcccaccttttcgactacagtagcaaacccttgtactaccaccccgataaaaaccacatcatcatcgtcaccacgacctggaaacgacacacgttcccccccaatcttgggcatgtgtatatatataaagaatgggagggagaggacgtggggctcgagaagaaataaacgccaagctcgattcgaaccaaaaaaccacatgtgtattgtgctttttttgtttttacggtggggaaaaggagggggccgtcattaacgaaaaccgtgtatggggtccggacacgaacagtacacagcttatggggaaaaaagctcacagagagaaaaaaacaccaagctcaggcacgcgtacatcattatcatcatcggatatctcaccacgagtcatagtagtaccaaggagtgtgtaacaccattttttcttttttctttgtaacgggataagggacagcaatcatcacgcacaacacccttcactctctttttagtcatccatatcatcgctgtaacacagcatgtcctcgtaatcgggcgtctggcagcgcattaccaccgagtcgtcttcttgcggtaccggtggtggcggcggcggcggcggctgctgctgggttaccgtcgtactgtgattaccgttggcggactgcaccgggatgataggctgcttgtggggaacctggggtggactgccgccgtgagaaggcgacggcgtcatcaagttaagctcaccacggtgactccggacaccggcgaggggccccgggggactgggagggaccgcggtcgtcttgtagacgacggtgtccccgtgtcgatccgtggctcgtaccagatcttgactgctagcgtcgtcactgtcttcgtcctcttccagctcgccctcagagtagtgctgctgcggttgcgacggtggctgggcgggaggagcggcggcgatcattggagagggatgtcgatgactcccttctctgtcctttttatcgtaggctgtcagcgttgctgggtccgtcctgctttccatatttgcgcattgctcatcggtgggatgaatttggtctcctccccgctgttgtccgccggcagtggcgtggttgctggcggttgtcgttgtcgtaccggcaaagacggtgagatccaatagtgactgctcgtcgaagggacagtacgctatcatgaaacgatagggtgccaacgcgcgttggatgcgcagttcgcacatctcgttctgacactcgtggcactgcagggcgcctaggatcaggtccgagacagcgccgcagcggtaggtacccatggcgttgttagtatcgaactggtcaaaaaattggggcgtaccggtgacttgcaacgcgcgacggcgtagcgagacggccacgcgcgagaaagagcacacgtaggccatggcgcggtgcatgggttgcgagaaggtctcgggcggacgcttctgcagatcgcagacgtcgtcgcgtagccaggcgctcatttgacctggctttttgactagccgtttgagcgtgctgcaatggtcgccccagccgtcctggtggtccaggatgcagcccaggtccaggttgttgagtttgttgaagagcagctgacgcatgccgcccaccgtctccagatagggatcgtgcgggttgacgggtagcccgtgcaggtggtggtacttcatgtagctgagcgtttcgtcgatgatggccagcaacgtgtgcaagttgggagcgttgtacacggcgaagatcttttccaccaccagcttgcgcagcaacggttcctccagccaatcgaactgttgacggatgtgcaacaggtagtcggtgtgcatgagctcgtcgtgtgacagcaggatgcgaccgcgcggctgatgatcttgcgggaaggcggtggggaccttgagatcggcggggtagggtgccagacgtagactctcggccgtgtagcgctgaaggtcgtagacgggcgaggtagaactcggtgaggtacccgacgaggcggcgccgcgctgcagacgcgctcttttcttcttttcgatcaaacggctgagttgctgtagttcgtcctcgtccatggcgtccagttcgtcgtcaataagcgccagcatctgttgttgttgcggtccggtggacgatccgtgatgattattggctgaagaggggtgagaagaaccgaaagtcgtaggacaactgggaactcggcgacgaagatgcgtcgaatcgccgccgtgatggtgcggttcgccgtcatcgttgtcgtaagacttaccgtagtgggggttaaggggcaccgaggcggacgcggccacgcgtcgcttgaaagaggaggacgccctatgtccgccacggaagcccgcggtgcccatgatgatgtgtccgccggtgcccccgagtgcgtggcgggaggagggtggaaggggaggaggatagtggtccggatcgccttcggtatcatcgtctttgctgtagcggggtcgtcgtgcggggacgcagggtcggtgatgatgcgaggcggcgccgacggtatcttccgcgagatggtattcgctggcggctgctccgttccgtgtcgacggcgaggttggacttcgctcgcgtcggaacttccgtggcacgggttcgtaatctagacagaagcgccgtgcgcgacgggcgcggcgttcgcgctcgctcagggaagataacgacggagcgtcgtgacggccgcgtgagtgcagctccatggccgccgtcgctaggaaggtcacgttcgggcacgctgatgtatatatagatgagaccgctgccggggggcgggtcaccggcgccgtggaaagtgaggctcagacggcggtcgccggcggcatgggcgcgtcgggcggtctgattttgatggaaatgtggacgtttttggcgttggagtgacactttttggtgaaacagcggctccagaggctggcccagagcgcgtagctgtgctcggtgcgcaggtcgatgaacacctgcacggtctcttgcgggttgcggtgcgtgtagttgagacagcgaaaatcccgcgtgcgcgcgccgtcgcgccgcttgacggccacgcagcaggcgccgtggggctgaaagaggaggacgtggggtgcggtaaactgctcgctgacgtgcggctcgtagtgttgcgtgaggtgctcgagcagcggcggccacacgcgggtgacgacgagccgctgcaagtccgtgtcggaaatcgcagcggcagtggcgccgtcgccaccgtacaggtgataggcgagcacctcggtgagaccgcggcgtcgataacgcgtcacgttaagcgagcgcgtctcgataaagttggcttcggtcgaggggcagattttgtcgcgcacgctgagaatgacgcgtggcggcggcgacaggggcaacgcgggcaggtcgtgcggcgggtggtggtgaagcaggttacgcagatccagttgggcgcgcacaaagcctagcgggtgttcgcggtaggcgtcgggcacgatgaacagcggcaacagacggcgatgcatgaaatagccgtcgtcttggtccattttatacatgtagggcagacgtacagagcgtccatggtggtagatgcctgtgtctaggctgctctcgggatgcgagatggggtccagcagcgtgtgcagttcggcgtcgagacagacggcgtgattgagcacctgcgccacggcgcgtaaaacgctggggtgtacggctacggtgcaggcggggaacggcgtgatgatgcgcagccccagtttgcccttgcagcggcagtaagggggtgacgtgtcaacggaggacgttggtttttgaaaaacgccgttatcagggacgttatttttgtcctctttcccgtcttcgtcttcctctgtgtcgcgctcgtcccggtaatcgagatagtcgtcgtcatcgaaaggcgcgccggccgcgtccacgggcacgctgttgggtgggcacgcgcttttgaagaaatagaccgggtgccggtcggggtgcgtgtagccaaagaggctcgcccatacggtcatccagacgcgtcgtagtccgcgacataattcaaagacggtgtgtcgcgccagaccggagacgccgtcgcgcagtcgtaaatcaaagtcggccacaaaattgaagacgggcagacgttcgttgaagacttcgtgtcgcgtgtagtagaactgtgtctcggggctggtgctggccacgtcgtcgtcgtgtagccacacggtctcggtcagggcctcgtccgagaaacggctgtcgggtacgtgacggagcaggtcgcgcggaaagaggctgcgatgccaggtttcggaggccacggcgcagaagacgtgctggtcattgggcaggtgtacgcggtagacgggcagcggtcgctccagcagcggtgccagcgcgggctcgggtagcaggtagcgacgttgcgagtaacgcgttagcgtgccggtggtgtaggtctgggctgtgcgcagcgaggcgcatagacgtaacaagccggacagggagcgttccagtggcgagaagacagactcggaaagcgtgttgatgcgttcgagctggcgcgccagctgcgtggaggtgccaaagaagcccgccaggtgcgtgccgtcgatgcggccgccgtagccggccagccccaggccgtgcgggctggtcgccgagtggggggattcgtcgagacccagtaggtgcgtctccacgtagtcgtgcagaaagttgtcgagcgagaagtatttttgcatgacgtccagcagctcggtggaaagccggcggcccagaaaacccggttcgcgcgtgcactgcgcttcgggcgccgcgtcagcgtcgtaagccaccacgcgccggtactcgagcaaccgcgcgcgtgccagcgccgtgcggtaggccaggtagacgtagtgcacgcagaccgtgtcgggcagacgcgcacgttcgcggaacgcgttgatctgcgtgtccacctgctctagctcggtgtagtcgcggcggttgcgcgccacggcgtacgccacgaaagcggacacgcgctgacggaagggcgagcccagtagcagacgcgcgaactcgcccatggaggcgtgcgtggggatgatggtgcccaggtcgcgcgtgcagaagctgcgcacgtactcctccacggtggagatggtgctgtactggccctcgaataggtagtaggccatggtcagcagcacctggccctcggtgtgcccgaagacgctgatgaaccacgagggcgaggtggggcagaggaagacctggttgagatgacgtagcacggccgcgtggtgaaagtacaccaggtgcttgaattcgcgcacctcgccgccgtgttcgggcgagagcacgggcgtgcggaagagatgccggtagagcggttgcgtctcggcctcgtccagactggcgatgagcgccgagagggggatgggctggcgcgcggccaggtagcgcgagagctgcagcgtttcgttgttcacggcgaagacgggcgccacccgccgcgagtccgagcacttttgcgtttgtaggcagaaataaacacgtcgcgagacctggtgtttgaccagcagggggaagacgcagtggtccgtcggtgtctgcgagagtacgttggcgactatatgagcagaatcatactctgttgcgaacagaacgagcgtcatcgtcgcgccggcacgatgcagctggcccagcgcctgtgcgagctgctgatgtgccgtcgcaaagccgcgcctgtggccgattacgtgctgctgcagcctagcgaggacgtggagctgcgcgagctgcaggcgtttctggacgagaactttaagcagctggagatcaccccggccgacctgcgaaccttttctcgcgacacggacgtggtgaaccacctgctgaagctgctgccgctctataggcaatgccagagcaagtgcgcgttcctcaagggctatctctcggagggctgtttgcctcacacgcggccggcggccgaggtggagtgcaagaaatcgcagcgtatcctagaggccctggacattctcatcctcaaactggtggtgggcgagtttgccatgtccgaggccgacagcctggagatgttgctggacaagttctccacggatcaggcctcgctggtggaggtgcagcgcgttatgggcctggtggacatggactgcgagaaaagcgcgtacatgctcgaggccggcgcggctgcgacggttgcaccaccgacgccaccggcggtcgttcagggggaaagcggcgtccgcgaggacggggaaacggtcgccgccgtgtcggcctttgcctgtccctcggtttcggactcgctgatccccgaggaaacgggggtcacgcgtcctatgatgagtttggctcacattaacaccgtctcctgtcccaccgttatgaggttcgaccagcggctgctggaagagggcgacgaggaggatgaagtgaccgtgatgtcgccgtcacccgagcccgtgcaacagcagccgccggtcgagcccgtgcagcagcagccccagggacgcgggtctcaccgtcggcgttacaaggagtcggcgccgcaggagacgctgcctacgaatcacgaacgcgagattttggatctcatgcgacacagccccgacgtgcctcgggaggcggtgatgtcaccgaccatggtcaccatacctcctccccagataccctttgtgggttccgcgcgtgaactcaggggcgtgaagaaaaagaaacccacggcggcggccttgctgtcctccgcgtgaacagcctggcacgttttggaaaacgtacgtgatcacggacacgacgagcacggggtttctcatagacgtactttattaggtcagggatgacggggaggtttcgggccgacgtcaaaaataacgtcactcgtgttgacagggctttctgcgtcggagctcttttcatcttcttctgtctcgtcgacgtcatcgtctaccggcgagggtgtccgttgcagcaacgcgtgctcgggcgtgtgggtgaaaccgatgtcgggggtgggcggcacgatcatctgtcctagggggtgactgcccaccggcagataggtaaagcggtgggtggtaaaaaccgctttggctacggtggtgtgtggggagatgcagacggtggtgtgcgaagtgttgaccaccgtcacgccggccgcggtacccgggagccagatggtgggtcgaatgatgagatccgattgactaaactggcgcacgcccactatgagggcgcagataccgggcgcgtgcacgtaggccgcgtcaaaatagacggtttgcgtgtgacccggaccgatcaccagcgtctgacgggtacgtaatgaaaagaaacggtgttcgttgggcggcggcaagttcatgagctgccagggttctggcacaaaacaggggaaaacgccgatatcgccttcgatggtgcccggaaagatggactgaaaagtgtcgttgaggttgacgacatccaactgcgggacttgcagcccggattccagcagctcgggcatgcaaacgaattgcgcgtccaggcatttgtaaaaggtaatgccaaaaaaaccttcggggatatagaggctgactcccagcgaggtgggcactttgcgctcgcgtgatagccaaatgatgtgtttattgtaaaaagccagctgcgtgtggcattgtttaacgatgaaactggaaggcatccacttgtagggaactttgagcggcgacggtaatggcgacgacgcttcatcctctcccggatgctgctctttgtcgtatttctcctcggtcgattggggcagcgtaaatgtggtttgaaaatcgctatcgctagcgaaacgcacgcagtaacgcatgttgacggatttctcggctaggatgatggagcctgatgacggtgcggactcttccttcattattaacgtaggggtctcccagaatcgctgaaaacgggagcgcggcagccgcgacagtaccagttgagagtcgattctgtcggtcaacattgtaagcatcgtggcggtggtgtgatggagtggaaaacagtgatactaggtgtttttgttttatcggtggcagcggggagttctggtaacagctcatccacgtcaacctccgcaactacgttaaaatcgtccagttctagcgtgtcaacaagcaaattgacgacaactgcgacaactacgacaactacgatgagtacgacctcatcgacaactaccactaaaccaagttccactactcacgaccctaatgtgatgaaacgacatactcacgatgatttttacaaggcacattgtacatcgcatatgtatgagctttcactgtccagcttcgcggcttggtggactatgcttaacgctctcattctcatgggagctttttgtatcgtattacgacattgctgtttccagaactttactgcaaccaccaccaaaggctattaagggtggacagatttacagctcgacggtgttccggcggggtaaggtttccataagtgggtgactggagactaaagttacggatctcatctagaaatagcagcgagtctagatagtcccacaggggatctataaacgttctctgaaatcccgttgatggtgacgtaggtgtagtttcggaagccgttttgttttccacgaacatggtttcgttgtaatataaggagctcatatcaagagtaccgtaaatagtgtacggtgtttcattacggattagtacatgcgtgtttttcataaattctgatacggcggttcggttgcggcttgattcacaaaaagggttttgccggtaacgtagagtggtatacacccacgtcgctaggtcccttaattgcgtggtcataatggacttcataaagctactatcaggacgataagcaattgtagacgtggaaacccgccttgcggtggtagtaacactataagttgcgttagtagtgacgttcagagcggttgacgttgtatagggagaatatggcgtagtagtactttgagatttcttactctttttttctgattgttctttgactggagcttgtttacgcttgagttttcgcatagtgtttttcaacttagtaccgttaatatacttagggacgcgaaataaatttcggctcatggcgttaaccaggtagaaactgtgcgtacagttgcgttgcgcgtaacgtagaagcaaggcggttaggcctaaaaagtagatcgtttgactatccacgtttactttcttggaacctacatataacttcgtgttccaacgtggcacattgaaaaacatggggttgaacgtggtgaaattgccgcagccttgttcgccagtatcattacgtttggaaacgtttagcatttcggaaagacaagtcatggaaggcaccgtaccgcaagatgggggtctgaatgttattgttttagccgtatgattgtattctgagaaaacgtacttagccggttttcgaagctgagtgctataaaaatcgaaccaaagataggtaacactgttattttgaatgggtcccgctaaaatgtaataccgtggaaactcggtcatgttcatagtcagatttttaatgtgttgtctggtcatattaaagtattttgtatagatatccttttctagttgtttcaaaatctctaatttgaacttgtctagtctttgcttgcctatcgtagacagtactttacctgaccagtaacgtcctacggataatcgtaccgcagccctacagtttatgaaagagaatagcaggaaagttagcgacataaggaagaataaattaaaaacacctctcatctctccttttctccccatgacagaggaggagaccccgcaccgtccgtctgccttgtggtttggcttgcctgcgtgtactcactgctgattctggtcgttttgctgctcatctaccgctgttgcatcggcttccaagacgacctagtttcccgcaccttggctgtgtaccgagcttgtatccagggaccgatatgtaaccagacccacaacagtacctcgtaaataaagacgcacacacctcacgcatatagtaccatcacaccgtgtggcgtgtactttattacaacgagcaagagtgccccctaactattggggcccgtaccgttttagaaggttttgtgtgaatgtctttaacttctctgtcccttttctcataaactgtcaggtcctacagtcagcatgtcttgagcatgcggtagagcagatagatgccgatgatggccgatagcgcgtagacggacatcatgaggagacgactgtcggtggcgtccacgacaacgtcagttacttctaggaccgtaccgtttttcaaaagcatgaggtagtgagttcgcggagatgagaccaccacttcgttgtagggatccagggcgaaaaggacgtcgtccgagtcgtgcatgtacatgatgttgatgacgccttgcgtgtcgtcgtattctagcagggcgctttggcaaaaggcgcagttttctagggaaatgttgagcgccgctgtgatgctgtgtgtggtatgcatgttgcgcgtcagttcgcatttagtttgactgtccgtctgggtgatgatgaggctttggcctacgacggtggtggagacagggtaggagatacctttgatcaggtactggtttgttacgacataactgacgtgttcggagacggtcagcgcggagaaggattcgcctagtggcagacaaaacaggtcggggaaggtttccaacgtgcttggttgcatggtagataggatggagagggcggcgggaacggtagtggggacggtggcatcggggaagagacgtgtgaggcgttcgagcgagtgatcgcgtcgcccgctactggaacagggtgtgtacaggtcgctgaggtattcgtggtgcggatgagctagcaactgcgtaaagtgtgatagctcggccaatgaacagaggcccgtttctacgatgaagatttcgcgtctctccgtcgtatgtaccagcatggagtggacgaggctgcccatgaggtagagttcttgacgcgcgaaggctgaaagaaaagaggccaggtgcgttttgtgtagttttagggcaaagtcggcgatctgtcgtagtgcccactgggggatgagatgttgctgattctgtttagagagtatgtagaccaggcgtacgaggctggtgatgtcggtgatctgattcggtgtccaaagggctcgtttggccaggtccacggccgtgggatacagtagcaacgtggtgcgtggtggtgtttgtgagaggcaggtgatcataaattcttgtatttgtaagagtgcggcctggcggtctagggcccgtgggacggagacttgggcgccggcctcttcttgtcgggctgctgcgaacagtgctaatgcgtaggcgaaggccatttctaccgtgcggcggtccagcatctgacatcgaccgctcttgagtacatccacggcgtaacggtgaaagctgttacgtagtagtgcgctgaggtctaggtagttgaagtcaagtgcggcgtcaagaaagtccgggtctttgagataagagtgacggttcagttgatctttcttaactagcaccaggagctcgtgtttttcagtttgtcgtagtataaagttgtcgcgttgatagggcgctttgaaaagtacgcgtggaagatggccgaagataagcagcatgggtgtgtcgtcgtctatggacaccgtaactacgaagaagtcctcggtcagtgtgattttaacgtaacgtagttcgtcgatgaggtaaaagccttggtgcaaacaaggtgtgacggtgctgaatagtagatcgtgtccatcaaagaggatacaggtctggttaaagtgtggtcggtgtagtcctgaggtggtatgtgattctgtccagccgtgtggagtggtttgcggtggcatccaaacgtgaggtattgacaggtcaatgggcggtggcacagtggtgggctgttcacctaggctgtcttgtgcctttagctgctgcgaaaaagatcggtagctggccaggtctttggataccagcgcgtaagtgttaagtctctgttggtatctttccagggtttcggtcagatctacctggttcagaaactgctccgccagaggacccgcaaaaagacatcgaggcatatggaatacatagtattgattatagctttggaaaaagttgaaactgatggcgttttccctgacgaccgtgctgttacggaggctgctgttgtaggtgcactgggtggtgttttcacgcaggaagcggatgggtctcccgtaggtgttgagtagtaggtgaaacgcgtgagggtccagcgcttcggatgcggcgtctgcgccatatcgttgcgaaggtaggtgactgaggaggtagacggcgaagacggtgaggtaggaggggaggccgggccgcatagcgcggccgcgccgctgggttcagcggcgtgatccaggtggtggttggcgttacacccgagagaaggagaaaaaggatcccaggaaggagcacccgggtgcggcgctacgggttacaaaagtcgcgtctccgtctatttaatacgatgtcattggccgctgcgaagggagaagaggggacacgcgaataagccatgccgtccgggcgtggggacgacgctgatttgacggggaacgctctgcggagattgcctcacgtgcgtaagcgaatcggtaagcgcaagcacctggacatctaccgtcgtctgctgcgggtctttccctcgtttgtggcgctcaaccgcctgttgggaggccttttcccacccgagttgcaaaagtaccgtcgccgtcttttcatcgaagtacgattaagtcggcggattcccgactgcgtgttggtgtttttaccgccggactctgggtcgcgcggcatcgtgtattgctacgtgattgagttcaaaaccacgtactcagacgccgacgatcagtccgtgcggtggcacgccacccacagcctgcagtacgccgagggcctgcgccagctcaagggcgcactggtggactttgattttctgcgtctgccacgcggtggcggtcaagtctggagcgtggtgcccagtctggttttttttcagcaaaaggccgatcgcccatccttttatcgggctttccgctcaggccgttttaacctgtgtaccgattctgtcctggactatctagggaggcgtcaggatgagtctgttgcacaccttttggcggctacccgtcgccgtcttcttcgagccgcacgaggaaaacgtgctgcgctgccccgagcgcgtgcttcggcggttgctggaggacgcggcggtggcaacgcgcggcgggggctggcgcgaggacgtgctcatggaccgggtgcgcaaacggtatctgcgtcaggagctcagggatctgggtcacagggtgcagacttactgcgaggatctcgaagggcgcgtgtccgaggcggaggcgttgttgaaccagcagtgcgagctcgacgaaggaccgtcgccgcggacgctgctacaaccaccgtgtcgtccgcgttcgtcgtccccagggaccggcgtggcaggagcttccgccgtcccacacggtctttatagtcggcacgatgccatcacgggacccgccgccgccccgtctgacgcggcgaccgcgtcagcggccgccggtgcttcttctacctggctggcgcagtgcgccgagcggccgttgcccgggaacgtacctagctactttggaatcacgcagaacgatccctttatccgctttcacaccgattttcgtggcgaggtggttaacaccatgttcgaaaacgcctccacttggactttctcctttggtatctggtactatcggctcaagcgggggttgtacacgcaaccacggtggaaacgagtgtaccatctggcgcagatggacaacttttccatttcgcaggagctgctgcttggcgtggtcaacgctttggaaaacgtgacggtgtatccgacgtacgactgcgtactctccgatttggaagccgccgcctgtctgctggccgcctacggacacgcgctttgggagggccgcgatccgccggactccgtgacggcggtgttgagtgagctacctcagctgttgccgcgtctggccgacgacgtgagtcgtgagattgccgcttgggaaggccccgtcgccgtgggtaacaactattacgcgtatcgcgactcgcccgatctacgctactacatgcccctaagcggtggtcgccactatcacccgggcacttttgatcgtcacgtgctggtgcggcttttccacaaacgcggcgtcctccagcatttgccgggctacgggacgataacggaggagctggtgcaagagcgtctgtcgggccaggtgcgcgacgacgtgctttctctctggagtcgacgtctgctggtcggcaagctgggtcgcgacgtgcccgtctttgtgcacgaacagcaatatctgcgttcgggcctgacctgcctggctggcctgctgttgttgtggaaggtgaccaacgcggatagcgtcttcgctccgcgcacgggcaaatttacgttggccgacctgctgggttcggatgccgtagccagcggcgggttgcccggggggcgcgcgggcggcgaagaggagggctacgggggacggcacgggcgggtacgtaactttgagtttctggtgcagtactacatcgggccgtggtacgcgcgcgaccccgcggtcacgctgtcgcagctctttcccggcctggctctgttggccgtgaccgaaagcgtgcgcagcggctgggatccctcacgtcgcgaggacagcgccggaggtggcgacggcggcggcgccgtgctcatgcagctcagcaagagcaaccccgtggccgactacatgttcgcgcagagctccaaacagtacggcgatttacgtcgcttggaggtacacgacgctctgctctttcactacgaacacgggctagggcggctgttgtcagtgaccctgccgcgtcatcgtgtgtccactctgggctcgtccctctttaacgtcaacgatatttacgaactgttgtactttttagtgttgggttttcttccgagcgtggcggtgttgtaatttccaccacgtgtcgctcgctgcataaagggcgagcgtccccggagagggtatattcgtttggcgagagcgggcagcggtggtgggtatgtccccttctgcggagaagactacctcagtcaccgattccatcatgctcgctatcgtgaatttcaaatacatgggcccgttcgaaggctactctatgtcggccgatcgcgccgcctcggatctactcatcggcatgttcggctccgttagcctggtcaacctgctgactatcatcggttgcctctgggtgttgcgtgttacgcggccgcccgtgtccgtgatgatttttacttggaatctggtacttagtcagtttttttccatcgtggccaccatgttgtccaagggtatcatgctgcgtggcgctctaaatctcagcctctgtcgcttagtgctctttgttgacgacgtgggcctatattcgacggcgttgtttttcctctttctgatactggatcgtctgtcggccatctcttacggccgtgatctctggcatcatgagacgcgcgaaaacgccggcgtggcgctctacgcggtcgcctttgcctgggttctttccatcgtagccgctgtgcccaccgccgctacgggttcactggactaccgttggctaggctgtcagatccctatacagtatgccgcggtggacctcaccatcaagatgtggtttttgctgggggcgcccatgatcgccgtactggctaacgtggtagagttggcctacagcgatcggcgtgaccacgtctggtcctacgtgggtcgtgtctgcaccttctacgtgacgtgtctcatgctttttgtgccttactactgcttcagagtcctacgcggtgtactgcagcccgctagcgcggccggcaccggtttcggcattatggattacgtggaattggctacgcgtacccttctcaccatgcgtcttggcattctgccgctctttatcattgcgttcttctcccgcgagcccaccaaggatctggatgactcctttgattatctggtcgagagatgtcagcaaagctgccacggtcatttcgtacgtcggttggtgcaggcgttgaagcgggctatgtatagcgtggagctggccgcgtgttacttttctacgtccgtccgagacgtcgccgaggcggtgaaaaagtcctccagccgttgttacgccgacgcgacgtcggcgaccgttgtggtaacgacggccacgtctgagaaagccacgttggtggagcacgcggaaggtatggcttccgaaatgtgtcctgggactacgatcgacgtttcggccgagagttcctccgtcctctgcaccgacggcgaaaacaccgtcgcgtcggacgcgacggtgacggcattatgagcggcggcgctgtacgccagcggggagaaaagtggcagataaatcacgtcaggttcacacgtcgttagccagcgtcggcatatgaagggcgcgggcggccagtacggcctctgggctgagacaggacgaggcagggtgagaaagaggaggatgggggggaccggggtggtggtgctgctgctgttgtgggtgtggacggtgcggatgccgggacagcgtgccggcgaacgttctgtaatcttccataataaaggtaaaaatgcccgtctcgtgtcgactccgctggatctcgaaggcgtcgggggtaatgcgcatcttgccggtgccgatgagataaaagtaccacattttttgacagatgatgcgaatcaagggttcgtacgcttcggcaccccagtggcgcgtgaagaaggccgccagacgaaacaagcggtgtccgtagagcgtgcctagggagaagaggatgttgccgttgcgcgccaggtcttcggggaaaacgaccggcaggccggtgtggcgctgcacaaagcgcgtcagcagtccgccgctcaagcgcgggtgacacaggcgctggctgagacgggcggcgcgcgtttcatcgaacacggccgcctcaaagtccagccccgggaaggcctgacgcagttcgcggtacagatgaggccagtagggttgcggcgtcttgcgactaagcacggcgtggtccgagacgcccaggttgttcatggtttcgcgcagtagcagcgtttcgagaccgcggtgaaagaggaggacgcagatgaggcgtacgattttgagttcttccaaacgcagcgagctcagcggctgtccgcgcgacatcttctcgctaatctgtaatattagatgattggcgcaagtaaaggagaatttgcccgtgcggacccgcgggacggcggggttctcttcgtcgcgggccatcatcgttcgctcggtgagcgggtagcgacggtgacgacaatgacgatggacgagcagcagtcgcaggctgtggcgccggtctacgtgggcggctttctcgcccgctacgaccagtctccggacgaggccgaattgctgttgccgcgggacgtagtggagcactggttgcacgcgcagggccagggacagccttcgttgtcggtcgcgctcccgctcaatatcaaccacgacgacacggccgttgtaggacacgttgcggcgatgcagagcgtccgcgacggtcttttttgcctgggctgcgtcacttcgcccaggtttctggagattgtacgccgcgcttcggaaaagtccgagctggtttcgcgcgggcccgtcagtccgctgcagccggacaaggtggtggagtttctcagcggcagttacgccggcctctcgctctccagccggcgctgcgacgacgtggaggccgcgacgtcgctttcgggctcggaaaccacgccgttcaaacacgtggctttgtgcagcgtgggtcggcgtcgcggtacgttggccgtgtacgggcgcgatcccgagtgggtcactcagcggtttccagacctcacggcggccgaccgcgacgggctacgtgcacagtggcagcgctgcggcagcactgctgtcgacgcgtcgggcgatccctttcgctcagacagctacggcctgttgggcaacagcgtggacgcgctctacatccgtgagcgactgcccaagctgcgctacgacaagcaactagtcggcgtgacggagcgcgagtcgtacgtcaaggcgagcgtttcgcctgaggcggcgtgcgatattaaagcggcgcccgccgagcgttcgggcgacagccgcagtcgggccgccacgccggcggctggggcgcgcgttccctcttcatccccgtcacctccagtcgaaccgccatctcctgttcagtcgcctgcgcttccagtgtcgccgtccgttctccccgcggaatcaccgccgtcgctttctccctcggagtcggcagaggcggcgtccatgtcgcaccctctgagtgctgcggttaccgccgctacggctcctccaggtgctaccgtggcaggtgcgtcgccggctgtgccgtctctagcgtggcctcacgacggagtttatttacccaaagacgcttttttctcgctacttggggccagtcgctcggcagcgcccgtcatgtatcccggcgccgtagcggcccctccttctgcttcgccagcaccgctgcctttgccgtcttatcccgcgtcctacggcgcccccgtcgtgggttacgaccagttggcggcacgtcactttgcggactacgtggatccccattatcccgggtggggtcggcgttacgagcccacgccgcctttgcattcgtcttatcccgtgccgccgccaccatcaccggcctattaccgtcggcgcgactctccgggcggtatggatgaaccaccgtccggatgggagcgttacgacggtggtcaccgtggtcagtcgcagaagcagcaccgtcacgggggcagcggcggacacaacaaacgccgtaaggaagccgcggcggcgtcgtcgtcgtcctcggacgaagacttgagtttccccggcgaggccgagcacggccgggcgcgaaagcgtctaaaaagtcacgtcaatagcgacggtggaagtggcgggcacgcgggttccaatcagcagcagcaacaacgttacgatgaactgcgggatgccattcacgagctgaaacgcgatctgtttgccgcgcggcagagttctacgttactttcggcggctctccccgctgcggcctcttcctccccaactactactaccgtgtgtactcccaccggcgagctgacgagcggcggaggagaaacaccgacggcacttctatccggaggtgccaaggtagctgagcgcgctcaggccggcgtggtgaacgccagttgccgcctcgctaccgcgtcgggttctgaggcggcaacggccgggccctcgatggcaggttcttcttcctgcccggctagtgtcgtgttagccgccgctgctgctcaagccgccgcagcttcccagagcccgcccaaagacatggtagatctgaatcggcggatttttgtggctgcgctcaataagctcgagtaagagagacgctatatttagggtttccctctcttttttttttctacaccgtgataccctaataaagcacactgcggttattatcaacgtctctgtgtttttattatttagaaataaatacagggaatgggaaaaacacgcgggggaaaaacaaagaagtctctctctagatgcggggtcgactgcgtggggtgctggaagtggaagcggtgctgatgggtgagggtcgtggcgcgggcacggaccgcaacgtgctgctgatgtctgccgcggtacgcacgtcgccgtccatgtcgctgcgcagataagaggtaggtcgtaatgcggcgtgctgcacgctcaccgttaatggtaccaagtcgtcaaggctcgcaaagacgtgccacgaggggatgacgagcgtgagagccccgttgttaccgcttcgacgtctttgtccggtcaggatcagtgcccgggacagtccggcttgggtgtccgagtcctcgtcgccgctggcctcctcgaagccggcaaacatggcttcggacaggggggtcggcgtcggtgtggaggagaggtcatcttcgtcgtcctcttcctcttcttcctcctcttcctcggtgggtggtaatccgggggactgcgggagaaactcggagacggcgccgcgcacgacgtcgctccgtggaaagagaccggcgcgcagctgcacctggggacgcttgattttgtccggtttaccgggtgtgagagtccaaaacccacggcggaaaaagtggatgcggcctagcggctgtcggtgttccaaatgaacggcctggtcgccggtcagcgtgacgcggagggtgattcgcacacgatcgggtagcgggccggcttctatggagacgcccgggatgttttccgggaaaaagatggtgtcgtgagtctgattggtttcgaaagcattctggatctgcacgatgtactcgggatgtatgcgcgtcagcgtaaaacttttgggaatcaacagctggaagccgttgtccggcaagcgtcgtaggtgcgggtacggattgtgtcgcgccaccacctcggcgcgatgcgtgtaaaccgaaaagtgcagaaacacgctggtcggcgggtgcggtgagtcgtgatgcagaaacagcatgatccattggcctcgttcgtccgtctccgttttgtggatgtacgtgttagggtccgaacaggccagctgctccagggcgtctaccagcgtcagcgggatggcgccggcgcgaaaggcgaactggctgacaaagatctgccctgcctccaaactgctgtcggttctgcggcgccagttcggcgtcacggtcagtcgcacggcccagtggtgagccgtgcggcggatgatggcgcgcgcctccattcgcggccgattttcttcgccgccgcgccgctggctctgaaagaggtgcagtccgctaacgggcacgcggtctagcggcagcgcaaaggccagcaccgagaccgtgttgttttctgagcctggcgtcaggcgtcgtgggccaaagttgttgaggtccaccagcagtcggtcccgttcgcccaccacgcagcggcccttgatgtttaggtcggtcaggtctacggtgtcgtgcggagatttgttctcctgaaaacagcagagaaccgagggtcggctcacctctatgttggtacgcaggtccaggagtcgcagacgaccggcttccagcgagccgccttccacgttggtgatgagccgaagcacctggcagtgcaggcgaccaaagctgccgctggcggcttcggcctcgctgatcgcggccgcttccgacgagggtccctcaccgggcgaggacgatgcctgagacattgcgaaggcgggatggggggagggtcaggggatgcgcaaaggtgaacgggtcttcgtgggaggtcgggaagggttccggcaactgtcgcaaatatagcagcggcgacaggtgtggcgcccaaaagtcgcgtgtctgagtggacgtgggtttttatagagtcgtcttaagcgcgtgcgcggcgggtggctcaacctcgatgctttttgggcgtcgaggcgatgcatggcccgggcagggcttcttgccggtggcggcgacgtttgggttgcgcagcgggctgccatacgccttccaattcggcgaagatgcggtagatgtcgttggcgtcccagaagaactcctggtacttcagattctgaccctgaaccgtagccaccatgggcaccaggttgcgggccaggatgccggcctgccagggcggccaggtgaacacggccggattgtggatttcgttgtcggaatcctcgtcggtgtcctcttcgggcgcgacggtggactcggccttaaggcggccgcgtgtcataacgcccgccgtgcacgccgtcgccgaggatgctgatttgcgtttgcggcccgcggaagtggaggcgcccgccatggcgccgccgccggtaacgcggggcgtcttgcgctcggtggttacgagttcttcgtcggagtccgatccgctggtccagacgtcgtcgtcgccctgggcggcaccctcgtcgtgccggtcccaggtgtgtcggtactcaagcttgccctggatgcgatactggctggtgaaggtggggtgctcgctgtactgaggcccgcgctgcagcagcaagtcgatatcgaaaaagaagagcgcagccacgggatcgtactgacgcagttccacggtctcgcgtatcgcttgtacctccaggaagatctgctgcccgttcatcaacaggttacctgagatgctcaggcccgggatgctcttgggacacagcagcccaaaatgctcgtgtgaggtaaaagccacatccagcatgatgtgcgagatcttgcccggtttgattatcatatttttgggacacaacaccgtaaagccgttgcgctcgtgggggcgcatgaagggttgcgggttgcgggtcatcgtcaggtcctcttccacgtcagagcccagcgtgacgtgcataaagagcttgccggagggcacgtcctcgcagaaggactccaggtacaccttgacgtactggtcacctatcacctgcatcttggttgcgcgcgtgttctccatggagcaaaccagctcgtgcgcgcacaccacgtgccgcagtgccacgtccttggtgggaaacacgaacgctgacgtgtagtagacgtcgggctctttccactggttctgctgacgcgtccaggccagtcccgagaccgtgagacgcgcctgccacatctgcttgcccgacgcgtgaatcacagcgtcagctacgggcaggtgtcggtgtttgcgctcggccgccgacgggtagtggtgcacgttgatgctggggatgttcagcatcttgagcggcagcgcgtacacatagatcgacatgggctcctggctggggcagatgcttcggcccgtggggttgtgcacgttgaccgacacgttctccacctcgctgcccgtaaagtacgtgtgctgcacctgcagctgattgtcgccgcggtggcatggcgtcgagtcgggcgtgtactgcgacaccaggatcagcgagggctggctcacgcgtacgtggatacccgtctgcaggagtcgcgtctcgtgcggcagcaccggcgtgtcgccgcgactaaacacggctttcagcacgtgccccgaaatgggacccagtacggatatcatttcgggacaacggcgaccgcgcgactccatgctgcctgcgcgtacgggtgtaggcgactgagcggcgcgccctttgcggccgccgccttacataggcaggcgaccaaacgcggaacccgaaataaaaacgttctacacagagacaaccgcggattattgagtgtctttttttattacaaaaaaaaagaggcaaagccccaccgtcaccacaccccatcacacaccaccaccgattttttttgttttaaccccgtatcgcgcggacgcctagtgtccgtttcccatcaccagggtcctctgtttagagatcgccgcagaccatggctaaagtgacaggactcgttttctctgtcgtattttccgtgagcttacagtcttgcggttccgtctccggggacgccagtcgcatgggcagcaggtcctccagcgcgatggaagcgcccagcaccgagagctgctgttgcgacggcgaatgggacgtggaccgcgagtgtagcgtggatttgacttggtgcgtcattgctgacaggcaaccgcgattcagcgtatgctttgacgagataaaatagaggcgtcccaggagcgcgtcccgtgggaacgtggcgccgttctcgtcgctcaccagtacggttaattccaaccaggagcgcggtagccagaccgtaacgggcattttgagtccctgacggttgtgtggtacaaaaacacccagataaggcccgtaaaagcggcggtagatacgtaacgtgtgcgagtttttcagcgtcaattcgtaagggacgcgcacctccagtccctcgtccgccgcaccggagcgtggcggtacaaagtaaggcagtggcgcgtccgaaaagaagggtcgtcgcaccgtttcgcgtcgcagccgcaggcgaaacgccactgggtcggctggcgcctcggtgcggtcgcaggtcacgttgaaacgtaacatgccgtcttggtatagcgtgagtgacgacagcgtcaggtccggcggtgattcgttcgggtctagctccaatcgtccaaagacggagggtcccaatgtcttggcagtggtttccgagaggcgcgccgagatacggctggtgagtccacgcggccccgagatgccgccttccactcgatgccagcacagcgcgtgtcgtacgcgcaccgtcagcgtgggcgtcagatccgcgtccgttgattccgcggtatcagcgacggaagccgcgttctccgttacgttgtttatatccagcgtcggctcgaacgtgagttctggcagatgcagcgcaagacagtcgtgtaacgccgtgtgatgcgcggctttacgtcgtagcggtagccgtttcagcagcggcgtgatgatacggagcgcgaagagattgagtgataagcgcacgatggccatgcgcgtcagttgctggtcgattactgagcgcaggatatggcagcctgggcgtgcgggaaagagagagaaggccgggcgtacgtcagaatcctcgttagataccacgcatagaatgccgcgttcacgatcgtcgttgcggtcatcctcgtcctcttcttttttcttctctttttccttttttttctcgggctcatgggaagccgccgtttcttcttcttgcgacgtcgcggagtcggtttgagactcgccgttcgcttcccccaattgcagcggcgtagagagcagaatctggaagggatcccgcaattcttcgggtcggaggtcgaggtgcaactggatcagatggtaggtgccgcggtgcacccgaggctgacggatgtcgtgtttatccgtcagtgtgaggatggtctgcggcgagccgctgtgcttgtccagctcgtccggcgttttcaggaggaggctgtcgtcgtcggtactggcgacgcccatcatggtcgtggtggtagtggtggcgaggaaagtgagcggcggcgctgacagagctcggcgttggcggcggcatttgccgctgtgtcggctgctattgctgccaacgccaccgccgccgcctcgtctggctcgtggccggcgggcccgattccgaaggttggggtcgacgcgtggcatgcttggtgtctgcgggcgcgagagggctggctcagcctttaaatatgcaggtcgcggatttgttatcgggtgaaacgtcacacaccgtgaagacgacctgttcgcggatgaggtcatccagctgtcgcagcatgacgaaaagcgccgacagccgcgcgatctcgtcgtcgggcgacacgtgctgcggccgcgcgggcgtgcgcggctcgccgacgctgcgctcgcggtccagccgcatcagcagctcctggcacttgacgagcagcatggagctgtcctctagcgccaacttgcgcacgtaggtcatggtcagctccgaggctaggttggccaccatggacatggagaggcaggcggtcttcatgtcgatcagcaggtgctggtcgatgaccggatcggggatggtgaaggtggcgtcgcgaaaagtaatggtctgcagctgctgcacggcagcctttacctcctcgtacgaacggtcgagcgagaagaggcccatgatgagtagtcgctggttgatttccagcgccagtggcatgggtacgatccagggcagcaccagctcccactggcccagcgtcagcaggttctcgcgcgccagcggtccgtggaagagcggcggcagcacgcatagcgcgtcgcccttctcccaagtcacgggtcccgtgttgaggacggtgtagagcagtccgtgcgtcggtacgtgtaggaggatctggttgccttctacgcgccgcatcaacgtcagcgtcatattgcgcagcaggccgcgcagtcgtacgtagccgcgggtgtgatctacgaactggtgtaggcccagctggtagtgtttgatgagatgtagacgctgcggaatgggcacaacggccgctactagcttggtcagtttgcctacgtcggcgatgctgagcttgtggtcgaaagtgcagaagatgttggcctccatggccgccatagcggcggtgaaatcctggccgcgacggaggagaagcagagacgaacaacgtctgcaccgggcgcggcgtcagagcgagcgtggcgcgtccgggcccgcgtttgcgtctaggtgattcgccgttaacctgcggtcgtcgccgtcctcctcaccggacggcctcacgagttaaataacatggattgctgtagcgggatgatttcgcctacgacgtagttaccaaagtgcgtttcggacgtggcaaaagccccggcgccacccttgagtttggtctccatcagcgccagcgtggtggtgctgaggatcggtagcgcttcctgcgtcagacggcacgggttttcgatgagttgttccgtgccttcgacgcagacgtactgcgtgtccgtgtcgccgcggatgcagtccttggcgcgtagcaggtactcgtcgatggttttgaagagcgttttgttggccgcgataatctcttccgtgttaaagtactgcgcgcaggggctgtagaatttggagttgtagcctagacgttcgcgatgtcgggtgttgtagagtacgtcgctcagacagccggcttgcgaggcccaggggttgtgtgtggccgcgaaagtctgtgcgtccgcttcgcgatggtcgtagatggccttggtggcggcctccgtgtcgtacggatcgacggccagcatgcaggaggcacgcccgcgcgggttgttggggatcttaaagtaattaacgtccatcgtcaccggcgtaaggattagttcgcacgcggccttttgtccgtgcaccgtggcggcggcattgcgctcggacatgctgccgaacgtcagcatggagatggtctccgtgtctaacagttgcggccgttctacgccggccgcgtgccggatccagcggtccacctcgtcgtgccggtacacgttcatagggaagacgcgaaagaggtcctgcacgcggacgcccatgtcggttcgcacgcggtttacgtaggctacgcaggtatttgacgtgtaacccagacccatgtctacggtgttaatgttctgcgtgacgtggtacgtggtgctgatgtcgcgttcctccttggtcacgatagggttgttgatgataactgacgtgcacgatttgccgctgtagagcagcatgtccacctcgaaggtgtcggtgcgtacggccgtgagtgcgaatcccgggtggatgtgcgccttggtctgcagcaccagtgaaactggtgagattttgtataacatggcggccagcgtcatgactgagtgcaacacgttgggacaggtggccgagtaacgcgaaaagggcgagcgcagccagttgtggtactcgtgtgcgaaggctgtgggtagcgggaaaccaccgtcgtgacggtgatagtgcgggaactcggtcacgtagcgtttaatgtcgtcgctcaacgccgcgcagatggtggggtttgagtagaaacggtggaaaggtacgggtaggctgtactcgatcaacgtcttaggcgccgtcacgacgcagcagccgttgtaaagcacgtgctgacgtgagataaagtccggcaggccctgacgttgcgcgtggtccagaggcgcgcgcacttcgagcaccttgacgtgctcgcccacgaattgcacggccaaaaacagttcacgacaggcctgcagcagcggcgtgtgcgcgtcggtggcgacgtcctccaccagctcggtcagcatctcgcctacggcttgacgttgcgccgctatcgagtcttcgggggtgacgccgcttgtgctctctttcgacgtcgtacctgacgtggagaccgcggtggcggccggcatcaggagaaacgccggtcggtaaaagaggtctactagcagcgtcttgaggttgagtcccaggccgcaggcccggttgttggtcatggcgggcatgaggcagagataaaagaccttttgtaacgtccattcgtcgtcggtggcacggtaatcgtccacaaacagcggctcgtcggcatccatggcgcccaaacgcggtacgtcagaaacgccgtggtgtcgcgcctcgatgttggccgggttcaacggttgccggtcggccactacctgtacgccttccatgttacgcggcaggtgcgtaacgaaggggggccacagccggtggtcgtgcagcgcgttcacgtaagccgatagcggttcctcagccagttgaccgttgttaagtcccggcagcgctgagatgcgcgttaccagacgcagcacggcgaccagattgcggtagtgaaagagcaactgcggtggtagggcgccatcagccaggtgttcggcgatcaacgtcaccagcgcgtagctgtgcgcaaaaaccagcagctgacgtgtgtgaaacatgttgacgatacaacgtgctacgaaagtgcggattagcaaaaaagcgtcgacgttgccgtgtaccagcacgtcgaccaggtagcagagctcggggtaattggggcttgtcacggtggttttgaaaagtcgcaacgtctcttcgtagtcgggtggtggccgcagtcgcatgtgttccatgatctcccaggtgcgcagttcgtggaaggggcccggtgccagtccatctggcaaattaccgatgacgatacgcggtgtacacagcgccaccgtttcgctgttttcctggcagtgcgtaaagtcgaagaaggggtgcagctcggtgtagagcgtgatgttgcccaccttgtagaagtcggtgaccacaaagtcctgcttcatttcgttcaccgtgcgcgggacctcgcgtcgtacgcggtaaaaatgcggtatgcggcgcgccgcaccgcccatgggttcctgctgaaaacgacactcgagcagtcgttgcatggcgggttccgagggcggtccgcgttccgtgaaggtctgtagacagggcgcgggctcgtgcagcaccgggtggcacagcgtcttgagcgcgtccacaaagtctatcttttgtacggcacggtcccggtttagcaggtaggccgtggtgggcaacgcgttgcgaacggtgtcgttaagcttaactttgctttccaccgtggtgtaaccgcgatcctcgggcagatacagccctacggggaagaaaaacgtcaggtccacgttacgttctagcggatctttggtatcggtgtttttgtagacgcgccgcaagttttccataatcaccgttttttcgcccagtcggatcacgtccatgctcagcggcgttaagctgtgcgccccggcctgcgaaagcgagtcgttgggcaaatgcggttggcccgaagtcagatgagccttgtacgagttgaaatcggccaggatcgagtgataggatatggcagtgacggcattttcgggactgagtacaaaattgccgtaggtggccggcgccgagaccgtttctttggtgatgtggcttgagagcagcgacatgatgatctgcataacgttggccgtgcttaccatcacgccgctgatcttggcccccgagctcgtggtgtacgtcgtggggttgtctaggatgctatcggtggccgcttcggctagacgcgtgaggaacttgagcacatagtcgcgatcgcgcgtgcgattcagcaaaaagagcgtggccagcattttggccttgaagctctgcaagatgttgcttcgctggatgcggttcagcgcctgtcgcgccagcgtggcgttctctaccagcgtctgcactacaaagtacggcggcgccttgcgtagcagtgtctgtaaaaagctgtgaatcaagccgcgttccatggcgtcggccgtgtttttgagcgcgcgcagcaccgtgtgcatagcttccacgttgaggatcttgtccaggatggtgccttcgaacgtctcgcgcagatacgtgaggcaggctgcgctgagctcaaaggggatggtgatgggggatttttcactgtatttggtgaccataatggtggtctgacgactggtgggcaaaccggcgccgctggccacacgcggcacctgcacgtggaacagcatttttcccgtagtcagtttattgaggtcgtggaacttgatggcgtgcgccgccgcggccaagccgctggtcaaaaaataaacccattccaggcgattgcagaaggtgccgaagatggcttcgaagtgaatattgtaacgctcggggtcgtcgccgtagtagatgcgtaaggcctcgaacatctcctcgccggcgctggtcttgacgtgcgtcagaaagtcagtgggaatgcctactttaggcaggagctcgagcgccgaccagttctccatcgcggcggcggcgtgagcgcgaggcgtcggagctcggggaaagcagcgcgacccggagaatggccggcgctgcgccgcgccgcctcggctgtgacgctctaatagtcgtcggcggctccgctacgccgcgccgggttttacacgtccccgtgcacgttcgcgcctgcaacctcacccaagagctatcgacgggcgaggacgcccgcttctgtcgtccgcgacccgttaacgtcgaacgggtgcgcgctgtttttgcggctctctaccgtgcctgtccgatacacgtgaggaccgagcccgagcgtgtcaagctggtactgggtcgtctgttactgggacccgtggccgtaccctgtttttgcgacggtgaagtggagggccacggtgaacatctggtacctacgacgcagttttgtcgcgggccgctgctctacgtgcaccgacgttgttgttgcggatccgtgaccgccgggcgcgcgctgtcctaccacgttctcgaaaaccacgtggccacgcatgtgctacgcggattgctctcgctgacggaatggaatcgagaattgccgagcctcttttgcgactgtcctggcggcggtggcgcctcgggaaccgaggaacgctacgccatggcctgcctgccgcgcgacctcagcctgcacctggacgactatccttacctgatggtggaaatcggacgcgtactcagtgtcagcgaggtagacgactacgtaaccgccgtctccggctacctgggcgaggccgcggcgccgcgcattcaggttcactacaagctgctctttggactcaacgtgcgtccgcaagcgccgtgcgcgttggacgctacacgcgacttttttctgctggagctgcaaaagctttggctgggcgttgaatatcaccacgaagtgacgtcggagtttttcggtcgcgtgctggcccagctgcatcgcgaccgcgcccgcgtcatgatggcgcttcgcttgcccgagcagacggtgtgccacctgagcaccttcgttctcagtcgcttcaagcgacaggtactgtacttcaagttacaggtgagctacggcaagtgccggactggccacgctgacagaagtgggggaggggggaacggtggaaatcagggacaccacaacctactgtgttatcgacgccttagcgtcacatttgccgacacagacacggtgtggagaaaccttttctacgtttattacgaactagctcgggatctggggtcccatgggacagagaaccgacccgtaaaccgcggttacggtgtttcttgcgctccgaggacgtcgcggctatcaccgtcagaatcgacggtggtttcggcgaacggacacgcgctgtcttccaccgcgctcccgacgacgagcgcgggtcacaagctgtcactgccgcgcgacccggccgccgatcgcgttcgacgttacgtgtgcattatctcgcgtctcatgtacgctcggtacggggagagatggcgtaaacaccgtcaacggcggtcggagacgggagaagaggaggaggaagagacgctggaatcgggggagactgacgccacgccgccatttgactttacggggcagcagctgcgccgggcctatcaggaacaccgacgtcgtaaacatctagccgtgcagcgttacgcgccgtgccgtcgtaagctcatcggcgggatggagtttgccgaggtgacgggcgtgagtctggaccgcatcgccgtcaacgctttcaacaccaaccgcgttatcaatatgaaggccgcgctctcgtccatcgccgcgtcgggtctcggcgtgcgcgcgccgcggcttcccaagaacatgacccacagttttgtgatgtacaagcacacctttaaggagcccgcttgcaccgtcagcacctttgtttccaacgacgccgtctacatcaactcgctcaacgtcaatattcgcggttcctaccccgagtttctgtactcgctgggcgtgtaccggctgcacgttaatatcgatcacttttttctgccggccgtggtgtgcaatagcaactcctcgctggacgtgcatggactggaggaccaggcggtgatccgctcggagcgcagcaaggtgtactggaccaccaactttccgtgcatgatctcgcatactaacaacgtcaacgtgggctggttcaaagcggctacggccattgtgccgcgcgtctcgggcgctgacctggaagccattctgctcaaagaactctcgtgcatcaagaacatgcgcgacgtgtgcatcgattacggtctgcaccgcgttttcacgcaactagagctgcgcaattcgtaccagatccccttcctggccaagcagttagtgctgtttctgcgtgcttgcctgctcaagctgcacggtcgagagaagcggctgcagttggaccgcctagtatttgaggcggcacagcggggtctctttgactacagcaagaacctcacggcgcacaccaagatcaagcacacttgtgcgctcatcggcagtcgtctagccaacaacgtgcccaagatcctggcccggaacaaaaaagtcaaattggatcacctgggccggaacgccaacgtgctgacggtgtgtcggcacgtggaagcccacaagatccctcgcacgcgcctcaaagtgttagtcgaggtgctgggcgcgttgcagagtatcagcggtacgccgcacacgcgcgaagtgatccaccagacgttgtttcgattgtgctcggcggccgcagccacatcgggcctgtgttcatcccctcccccattgtgtgtgtcctcatcttcctccgtcccctctgtcccaacctccgtcagcgttgacggcagttctgaacccacgtcgccgcgagcgcggtttgcatcacgatgatggaagccgcggccgctgccgccgcggcgtttcgtccggaggagcgtccgacgccgggttggcacgacgcggcgttgttaatggacgacggtacggtgcgcgagcacgcgtttcgcaacggaccgctgtcgcaactgattcgccgtgtgttaccgccgccgcccgacgccgaagacgacgtggtttttgcatccgagctgtgtttttattgcagcggtcgttttaaccgcaggtcgtccgtcttctccatctattggcagaagcatagcgatctggtgtacgcgcttacgggcattacccattgcgccaagttggtggtggaatgcggtcagttggggagtagtaggctacggtggcgcgacggtgatgcgagtggtgaggagcgccggggagacgacgacagcagggacgagctgtacgacgtgccgggcatttatatgattcgcgtcaacgacggcggcagcaccggtcccagacacgttatttggccgggtaccagcgtgctttgggcgccggacgttgtgatcactacggtgcagcgacgaatctcggcggcgcgcgccctggtgaacacgttccgccaatatttttttttgctggaacggcgctcgcacgaggagctggttctttgtccgcccgagatggaggagcgtctagcgccgttgttgcagagtgccacgcgcggtgattcggacatgtttgacggtgtggtggccagcgcttatcaccgtttgcgaatgagtaatattccgcgttcatccgcccgtctgctggagcactgcgtggggctggcgggtgctaagaagctgctcttgctcgacgtgccgcgtctggagaactattttctttgtcaggtctgtctttacgagctggacgaggacgagatgggcgaggagatgctgggcatgttggccggaaagcccgaggatgccgccgtctcgggcgcaagcggcggttttctgctacatcgcaagacgatgaagctggccgcctgtctgtgtttgttgctcaattcgctgcatttgcaccaggaggcgctggaggccttggatcctccgccgccgcgcgtcgaggagaacgaccttgtcaacgtggtgctgcgccgttattatcgcagtcacggcggcgtgcaggcgcggacgctggcggcggcccgggctttgttagccgactacgctgaaacgttttcgcctttggggagttttacgcgcctgggttacgatcgtctcgtttctgccgatgccggcgtcagtcgccggcacctggtggctctgctgcgtgcctagctgaccctgaaacggatggcgtgtatatcgtcacacaggtaggtggccatgatgacggcgatgataagatcgtccgagatacgattctggcgcttggccgagtagcgtgccgtcgtgccttcggccagcgtgacgcggtgcaggttctgaatctgctccagaagatactcgatggggtcgtggctcagcttgatggtgtaggagacgagctcttgcgaggctttgatgtagcccgagttgaaacgcgagatgaactgttccacggccagcgccttgtcgcggcccatgaggtagaagggctgttcgatgtggttctggtcgggcgtgtggtagaagagcacgcggatgagcgtgctgctctgcacgctctgtcggatgaggcaggcgatgcgcacggccgccgcctggttggtgttgccctccacggcgatacgcagttcgtccaggtaagggtgcaggctcagcaccgagatgatcatgtgcgccgcgcactcggcgatggctacctcagaactctcggagaggtcgcgcaaaaagaaatgctctaggccgtaaatgagaaactggtgtcggtaggcgcctacggccgccacgcccgtgcccgaggccttgcggttggtggtgaaggccgggtccagatacacgtaaagcgtcttgccgaaataatcgtaggcgttggtgttgagcgtgctgtaacgcaaaatatcgaactcttcgcggctctggtccgtgatgagcacggtgttctgcgagattttattggtaccgccgatgatctcgtccatgaaagcgcccggcataaacatgttggccgtcttgcgcacctgcgagttgaggctgatgaaggtgggcttgtgcagtcggtagcaaggacacgccgtggcgtcgcccttctccgtgaagctgtgcaggtgctcttcgcacacgtaagagaccacgttgagcatgtcaaagggcgcattgttgaggcgcgtcaagaaacacgtggcgtcactggtagtgttggtggacgatatgaagatgatcttggtggtattctgggccaggaaccccagaatggtgttgaaggcctctttcttgatgaagtgcgcctcgtccaccagcagcaagtggaagttttgtcctcggatgctctgtgtagagaggagacagaaaagggactcttataattacgcacgctcggctggaagcctacagagtcggggtggggccggacaggtgagccaggtgagccgccaggtgaggcgggatcaccgtgtgccaaccgggctgcgacctgaaaaccggaaccaatccgccgacaccggcgccgcgtgacgcgcgcccataaaaacgaaagtgtcgtcgtcgcgacccgccacagccgccatgaactcgttgctggcggaactcaaccgactgggggtcgcgcacgccactacggaggatgtttttatctttgtcgaccgcctctttcaacacttttccttccttttccaggccgaggagtcaggcccgcgccgcttggaactggtcgcgtccgtgttcgagcacctgacggtggagtgcgtcaacgacatcctggacgcctgcagccatccggacgtgaacgtcgcggagacaagcaacacctgtcgtccctgcccttctcctgccccctccgcccccaaaactgtcagcgacgctcagacgtcatgtgcgacgcctcgggcgcctgtgacatgaggcacgtccagaacgcgtttaccgaggagatccagttacattcgctctacgcgtgcacgcgctgctttcgcacgcacctgtgtgatctgggcagcggctgcgcgctcgtctccacgctcgagggctccgtctgcgtcaagacgggcctggtatacgaggctctctatccggtggcgcgtagccacctgttggaacccatggaggaggcctcactggacgacgtcaacatcatcagcgccgtgctcagcggcgtgtacagctacctcatgacgcacgcaggccgttacgccgacgtgatccaagaggtggtcgagcgcgaccgcctcaaaaagcaggtggaggacagtatttacttcacctttaataaggttttccgttctatgcataacgtcaaccgtatttcggtgcccgtcatcagccaactttttattcagcttatcatcggtatctactcaaagcagaccaagtacgacgcgtgtgtcatcaaggttagtcgtaagaagcgcgaggacgcgcttctgaaacagatgcgttccgaatatggaaacgcacctgtattcggatctggcgtttgaagcgcggttcgctgacgatgagcaattgcctctacatctggtgctcgaccaggaggtgctgagtaacgaggaggccgagacgctgcgctacgtctactatcgtaatgtagacagcgctggccgatccgcgggccgcgctccgggcggagatgaggacgacgcaccggcctccgacgacgccgaggacgccgtgggcggcgatcgcgcttttgatcgcgagcggcggacttggcagcgggcctgttttcgtgtattaccgcgcccactggagttgcttgattacctacgtcaaagcggtctcactgtgacgttagagaaagagcagcgcgtgcgcatgttctatgccgtcttcactacgttgggtctgcgctgccccgataatcggctctcaggcgcgcagacgctacacctgagactggtctggcccgacggcagctatcgtgactgggagtttttagcgcgtgacctgttacgagaagaaatggaagcgaataagcgcgaccggcagcaccagttggccacgaccacgaatcaccgtcggcggggcggactgcgtaataacttagacaatgggtcggatcgccgtttgcccgaagcggctgtggcttctctggagacggccgtcagtactccattttttgaaattccgaacggagcaggaacctcctccgcgaacggcggcggcagattcagtaacctggagcagcgggtagcgcgtttgttgcgcggcgacgaggaattcatctatcacgcgggtccattggagccgccttccaagatacgcggtcatgagttggtgcagctgcgcctggacgtaaatccagacctcatgtacgccaccgatccgcacgaccgcgacgaggtcgcgcgtacggacgagtggaagggtgccggtgtctcgcgtctccgcgaggtctgggatgtgcagcatcgcgtgcgcctccgtgtgctgtggtacgtcaattccttttggcgcagtcgcgagctgagctacgatgaccacgaagtcgaactataccgggcgttggacgcttatcgggcgcgcatcgccgtcgagtacgtgctgattcgcgccgtgcgcgacgagatctacgctgtactacgacgggacagcggcgcgttgccacagcgtttcgcctgctacgtgccacggaacatgtcctggcgcgttgtttgggaactttgccgtcatgccttggcgctctggatggatcgggcggacgtgcgtagctgtattattaaggcgctaacgcctcgtctgagccggggtgccgccgctgccgctcagcgagctcgtcgccagcgcgagcgctcggcgcccaaaccgcaggagctgcttttcggaccgcggaacgagagcggtccgcccgccgaacggacttggtacgctgacgtggtgcgctgcgttcgcgcgcaagtggatttgggcgtggaagtgcgcgcggcgcgttgtcctcgcaccgggctttggatcgtccgtgatcgtcgcggacgcttgcgacgttggctctcgcaggccgaggtgtgcgtgctctacgtcacgccagacttggacttttactgggtgctgccgggcggctttgccgtctcttcgcgcgtcactcttcatggcttggcgcagcgggctttgcgagaccgattccagaactttgaagcagttcttgcaagaggaatgcatgtggaagctggtcggcaagagccggaaacaccgcgagtatcgggccgtcgcttgccgttcgacgatctttagtccggaggacgacggctcgtgtatcttgtgccaattgctgttgctctaccgcgacggcgaatggatcctctgtctttgctgcaacggccgttatcaaggccactatggcgtgggccacgtacatcggcgtcgtcgacgcatctgtcatttacctaccttgtaccaactgagcttcggaggtcctttgggtccagccagcattgatttcttgccaagctttagccaggtgaccagcagtatgacgtgcgatggtattacgcccgacgtgatttacgaggtctgcatgttggtgccccaggatgaagccaagcgcatcctggtcaagggtcacggtgccatggacctgacctgtcagaaggcagtgacgctaggcggcgccggcgcctggttgctgccgcgtcccgaaggctacacgcttttcttttacattctgtgctacgacctgtttacctcatgcggcaatcggtgcgatatcccttccatgacgcggctcatggcggcggccacggcctgcgggcaggcgggttgcagcttttgcacggatcacgagggacatgtagatcccactggcaattacgtgggttgcacccccgatatgggccgctgtctttgttacgtgccctgtgggcccatgacgcagtcgctcatccacaacgatgaacccgcgacttttttctgtgagagcgatgacgccaagtacctatgcgccgtaggttctaagaccgcggcgcaggtcacactgggagacggcctggattatcacatcggtgtcaaggattctgagggccgatggctgcccgtcaagaccgatgtgtgggacctggtcaaggtagaggaacctgtgtcacgtatgatagtgtgttcctgtccggtgcttaagaacctagtgcactaacggggtctgacagttcacggggagaagaaacaagaaataacaaaaaaaaaaagaggacatggactcgccacggtttgtggcaaggcgtatgttatcatcatggagctactcacgttggtgttgtagcaactggcaaaaagcgccgtgctcttggcgccgcggtggtcgatgctgatcacgttgtccttgttctcgaccacgtagtcgcgcgcgaaggtgtggcggcagcggaactcgacctctttgagcacaaactgcgacacgtgcttttggtgcgccacgtagccgatgctgatgccgatcatgtgcttaagcagaaacgagataatggggatgatgaaccaagtcttgccgtgacgtcgcggcaccaggaacacggtggctttctgcttaaagatgtcgatggaggtctgcgagaggaagtcgatctggaaggcgtggatgaggtactgcagcacgcgattggccagcacggggatcttggtcacggctataaaaaagatgacgtgtatcaataaattcttttgaaacggttcgagtcggatggcttttgcgtcgccctcgacggcggtactgaagccgccgtcgagccactttttaaagtcggtcatgaagttgttgatctgctgaaactgcggatcgcggtagagctcggtcaacgcgtccagcttctggtaggaggcgcgctgctcctcggagcacgggcgaaacgtcagttcatcgagcgcgctcttgaggcgctcgtgaaacagcagctcgcgctggctttcctcgggcgagttgtagtcgcggtggcggccgcagaaggccatgagcggcaggaaggcctcgttgcacgagtgggccagcccgagttcggggtgcatcatctggtagcgcttgcggcacagcgccgccacattggtgaaggccgtggagatgcaggaggtggggtggctcttgcgcttctgcagctccgcgtagcgctcctggatcttggcggccgaatctccgcgcaacatgatggcggcggcggtggtgcgagcggaggttaggcggcagcggcgagaggagaggaaaaagatggcgtccgcgaggacgacggaggatccacccgaaaaccacgttgtcgcggacgtggcttgtgggacgggcgccgtcactcgttcgtcttcgtcgtccttagtggtgtcgtcctcctcggcgtcaggctcagacgaatcttcatccgcctctcctctcagtttccccgtctcctccccctcaactgccgtcaggtctccggggtccgccggggtttcaacgtccctgtgctcggtggaacggatggtcgagctgtcggcgcagtctccggccgccgatttctcggtctccgaggcttggcgcttcgaggaggccgtaaatatggcgctggtggcctgcgaggccgtgtcaccttacgatcgctttcgcctaattgaaacgcccgacgagaatttcttgttggtcactaacgtaattccgcgcgagtcggccgaggtgccggtgttggatagcagtagcagcggtggcgatagcgggccggaggacaaaaagaaaaacgtcgggaataaaaccgcgggggaaaagaacggcggtgggtctcgggccaaacgccgtcgtagacgacgcgctccgaaaaacgacgccgccacgccgtcttttctacgtcgacacgacgtgctggagcgtttcgcggccgcggctgagcctttgccgtcgctttgtgtgcgtgattatgtgttacgcaatgctgaccgtgttacctacgacggcgaattaatctacggcagttacctgttgtatcgcaaggctcacgtggagctgtcactctccagcaacaaggtgcaacacgtggaagccgtgctgcgacaggtgtacacgccgggcttgttagatcatcacaacgtgtgcgacgtggaggccctgctgtggctgctgtactgtggaccgcgaagcttttgcgcgcgtgacacctgtttcggtcgcgaaaagaacggctgtcctttccccgcgttgttgcccaaactcttttacgaacccgtgcgggactatatgacctacatgaatctggctgagctgtacgtctttgtttggtatcgcggctacgaattccctgcgccgacgccgcaggcgacgacggcgggtggtggtggtagtggtggcggcggcggggccggcgcttgtgcggtcgagacgagcgcgtcagcaggccgggtcgatgacgccggcgacgaggtgcatttgcctttaaagcccgtctcgctggaccgtctcagagaggtattgcaggcggtgcgcggccgcttctcggggcgcgaggtgcccgcctggccggcctcgtcgcgcacctgtttgttgtgcgcgctctacagtcagaaccgtctctgtttagatctcgcgcgtgacgaggcgcggaccgtgagttatagccccatcgttatccaagactgcgccgcggctgtcaccgacgtcactttgagccacatcttgcccggccagagcaccgtctcgcttttccccgtctaccacgtcggcaagttgctggacgctctctcgctgaacgacgcgggtctcatcacgttgaatctatgacgtcggtcaacaaacagctcttaaaggacgtgatgcgcgtcgaccttgagcgacagcagcatcagtttctgcggcgtacctacggaccgcagcaccggctcaccacgcagcaggctttgacggtgatgcgtgtggccgctcgggaacagacccgatacagtcagcgaacgacgcagtgcgtggccgcacacctgttggagcaacgggcggccgtgcagcaagagttgcaacgcgcccgacagctgcaatccggtaacgtggacgacgcgctggactctttaaccgagctgaaggacacggtagacgacgtgagagccaccttggtggactcggtttcggcgacgtgcgatttggacctggaggtcgacgacgccgtctaacaggtatagcaatccccgtcacgcctctgttcatattttattaaaaaaaaacacaacataacgacagtgtcggtgtggtagctagtgcagccctaggaacagggaagactgtcgccactatgtcctccgcacttcggtctcgggctcgctcggcctcgctcggaacgacgactcagggctgggatccgccgccattgcgtcgtcccagcagggcgcgccggcgccagtggatgcgcgaagctgcgcaggccgccgctcaagccgcggtgcaggccgcgcaggccgccgccgctcaggtcgcccaggctcacgttgatgaaaacgaggtcgtggatctgatggccgacgaggccggcggcggcgtcaccactttgaccaccctgagttccgtcagcacaaccaccgtgcttggacacgcgactttttccgcatgcgttcgaagtgacgtgatgcgtgacggagaaaaagaggacgcggcttcggacaaggagaacctgcgtcggcccgtagtgccgtccacgtcgtctcgcggcagcgccgccagcggcgacggttaccacggcttgcgctgccgcgaaacttcggccatgtggtcgttcgagtacgatcgcgacggcgacgtgaccagcgtacgccgcgctctcttcaccggcggcagcgacccctcggacagcgtgagcggcgtccgcggtggacgcaaacgcccgttgcgtccgccgttggtgtcgctggcccgcaccccgctgtgccgacgtcgtgtgggcggtgtggacgcggtgctcgaagaaaacgacgtggagctgcgcgcggaaagtcaggacagcgccgtggcatcgggcccgggccgcattccgcagccgctcagcggtagttccggggaggaatccgccacggcggtggaggccgactccacgtcacacgacgacgtgcattgcacctgttccaacgaccagatcatcaccacgtccatccgcggccttacgtgcgacccgcgtatgttcttgcgccttacgcatcccgagctctgcgagctctctatctcctacctgctggtctacgtgcccaaagaggacgatttttgccacaagatttgttatgccgtggacatgagcgacgagagctaccgcctgggccagggctccttcggcgaggtctggccgctcgatcgctatcgcgtggtcaaggtggcgcgtaagcacagcgagacggtgctcacggtctggatgtcgggcctgatccgcacgcgcgccgctggcgagcaacagcagccgccgtcgctggtgggcacgggcgtgcaccgcggtctgctcacggccacgggctgctgtctgctgcacaacgtcacggtacatcgacgtttccacacagacatgtttcatcacgaccagtggaagctggcgtgcatcgacagctaccgacgtgccttttgcacgttggccgacgctatcaaatttctcaatcaccagtgtcgtgtatgccactttgacattacacccatgaacgtgctcatcgacgtgaacccgcacaaccccagcgagatcgtgcgcgccgcgctgtgcgattacagcctcagcgagccctatccggattacaacgagcgctgtgtggccgtctttcaggagacgggtacggcgcgccgcatccccaactgctcgcaccgtctgcgcgaatgttaccaccctgctttccgacccatgccgctgcagaagctgctcatctgcgacccgcacgcgcgtttccccgtagccggcctacggcgttattgcatgtcggagctgtcggcgctgggtaacgtgctgggcttttgcctcatgcggctgttggaccggcgcggtctggacgaggtgcgcatgggcacggaggcgttgctctttaagcacgccggcgcggcctgccgcgcgttggagaacggtaagctcacgcactgctccgacgcctgtctgctcattctggcggcgcaaatgagctacggcgcctgtctcctgggcgagcatggcgccgcgctggtgtcgcacacgctgcgctttgtggaggccaagatgtcctcgtgtcgcgtacgcgcctttcgccgcttctaccacgaatgctcgcagaccatgctgcacgaatacgtcagaaagaacgtggagcgtctgttggccacgagcgacgggctgtatttatataacgcctttcggcgcaccaccagcataatctgcgaggaggaccttgacggtgactgccgccaactgttccccgagtaaccgggacgcggaacgtgacggttgctgaggggaaaggcaacagagaaggtacaaacccaccggcggggaaaataccgaggcgccgccatcatcatgtggggcgtctcgagtttggactacgacgacgatgaggagctcacccggctgctggcggtttgggacgatgagcccctcagtctctttctcatgaacacctttttgctgcaccaggagggcttccgtaatctgccctttacggtgctgcgtttgtcttacgcctaccgcatcttcgccaagatgctgcgggcccacggtacgccagtagccgaggactttatgacgcgcgtggccgcgctggctcgcgacgagggtctgcgcgacattttgggtcagcggcacgccgccgaagcctcgcgcgccgagatcgccgaggccctggagcgcgtggccgagcggtgcgacgaccggcacggcggctcggacgactacgtgtggcttagccggttgctggatttggcgcccaactatcggcaggtcgagctcttccagttgctggaaaaggaatcgcgcggacagtcgcgcaactcggtgtggcatctgttgcgtatggacacggtctcggccaccaagttctacgaggccttcgtcagcggctgtctgcccggcgccgcggcggcggacggttcgggtggcggcggctcgcactacacgggctcgcgcgccggcgtctcgccgggcatccagttcggtatcaaacacgagggcttagtcaaaacgctggtggaatgttacgtgatgcacggacgcgagccggtgcgcgacggcctcggtctgctcatcgaccccacgtcggggctgctgggcgcttccatggacctgtgcttcggcgtgctcaagcagggcagcggtcgcaccttgctggtggaaccgtgcgcgcgcgtctacgagatcaagtgccgctacaaatatttgcgcaaaaaggaggacccctttgtgcagaacgtgctgcggaggcacgacgcggcggccgtggcctcgctgttgcagtcacacccggtgccgggcgtggagtttcgcggtgaacgcgagaccccgtcggcacgcgagtttctgctttcgcacgacgcggcgctcttcagggccacgctcaagcgcgcgcgcccgctcaagccgcccgaaccgctgcgcgagtacctggccgatctgctgtatctcaataaggccgagtgttcggaagtgattgtgtttgacgccaagcacctgaatgacgacaacagcgacggggacgccacgaccactattaacgcgagtctcgacctagccgcgggcgacgccgctggcggcggcgctgatcaccacctgcggggcagcccgggcgattcgccgccgccgatacctttcgaggacgaaaacacgcccgagctgctgggccggctcaacgtgtacgaggtagcgcgcttttcactgccggcttttgtcaatccgcgtcaccagtattactttcagatgctcattcagcagtacgtgctcagccaatactatataaagaagcatccggacccggagcggatcgatttccgtgacctgcctaccgtctacctggtctcggccatcttccgcgagcgcgaggaaagcgaactgggctgcgagttgctggccggcggtcgcgttttccactgcgaccacattccgctcctgctcatcgtcacgcccgtggtctttgaccctcagtttacgcgccatgccgtctctaccgtgctagaccgttggagtcgcgacctgtcccgcaagacgaacctaccgatatgggtgccgaactctgcaaacgaatatgttgtgagttcggtaccacgcccggtgagcccctgaaagatgctctgggtcgccaggtgtctctacgctcctacgacaacatccctccgacttcctcctcggacgaaggggaggacgatgacgacggggaggatgacgataacgaggagcggcaacagaagctgcggctctgcggtagtggctgcgggggaaacgacagtagtagcggcagccaccgcgaggccgcccacgacagctccaagaaaaacgcggtgcgctcgacgtttcgcgaggacaaggctccgaaaccgagcaagcggtcaaaaaagaaaaagaaaccctcaaaacatcaccaccatcagcaaagctccattatgcaggagacggacgacctagacgaagaggacacctcaatttacctgtccccgcccccggtcccccccgtccaggtggtggctaagcgactgccgcggcccgacacacccaggactccgcgccaaaagaagatttcacaacgtccacccacccccgggacaaaaaagcccgccgcctccttgcccttttaactcataaactttcaggtctcgcgtacgattcgcgagtcgggaatgggacacccgtgggtgtttctccgtgtgtatattatttttttttgtgtgtgtgtgtgtttgcgcccccgtgtgtctaatgtgctgtttgaaacacgtaaagtagctggtggaagaacagataaacctttaataaaaaaaaagtatgtgctcccgacccacggtctgcgtgtctcttttttatgtccatgtctccaagtctggtgcgggtggcggcggggtcaagcgtcctcgaagtcttcatcatcgtcgtcgtcctcttgttcgcggaggcgacggctttccaagctgtcgtggtgactgagcgcagcgacttcttcgccggaggctgtggccagcgcctggtacttgacactgccgctaccgcgtccgcgaaagtagcggacggcgcgacacgtcgtaaacatggcccatatgaaaaagagcatgccgaacgaccagctgatgccggtgcggtattcgttgctgaggaaggtatcgtactgcacgatggggtagatgaggccgcagagtccaaagaaggcgcccaggtggtagccgaattgcaccttgacgtattgaaaaaagacggcctcgatcagtaaaaagtagatgatggagatgatagcgtagaccacgaagacggctaacaccatgtggcctgtacgcacgaaaaagttgtttccgaagccgtagcacagggccatggctaccacggtggtgttgaaaccaagcgctacctccaccaggttgacgatgagcgtgcggaactgcaccgtacctttgagcttggggtgcagacgcgagaagaaaaagagtgagcgtttgtagctgcggtactgcgtgaccatgctcacgttgaaaatggtcaggcagaaaaagtgcacggcggccatgaaggcgatcatgctgggcagccgaaatgacatggtcagtgtgaatagttggaacgtgtccatgctgagaatgaagaggaaggctgtgaggctgtcgcccatgtacgaaatgtcgcgtgtcgactggtttaggctcatgcctttgtccttgcgcatgctgatcttgatccagcataccaggtagtagatggtcacggctaaaaagacgagctgcatgaacacggcgtagcacaccaactgcaccgagtctaagaaaagcataggcgtgtgcaggtgcattacgttgtaggccgacatgttgagcctttcaaagtccacgacgtgatagtagacgcaggggtagcccaggtgcggaaaattgctcagcactagatgcacgctgacgttgacaaaagtgagcaccatgaaaacgatagaagcgctccatgtccgtgtattcactttatccacgtgcgagggggccatggcgatagcggcggcccgctcgctcgggaggcgatgggggcgcgccgatgacgacaggctcgcgggtcgttaaatactacgatgggagccgccgcggctcacgacgcggtttgagcacgtccgggcgatcggtgaaaaaagaccccgcgggccttcgcgactctcttctgtccgaggatgaccgctcagccgccgctgcaccaccgccaccacccgtacaccctgttcgggaccagctgtcatctcagctggtacggccttctggaggcctcggtgcctatcgtacaatgtctgtttttggatctgggtggcggccgtgccgagccgcggcttcacacgttcgtggtgcgcggtgaccgtctgccgccggctgaggtgcgtgctgtgcatcgtgccagctacgccgcgctggcctcggccgtgactacggacgccgacgagcgccggcgcggcctagagcagcgtagcgccgtgttggcgcgcgtgttgctagaaggcagcgcgttaatccgcgtgttggcgcgcaccttcacgccggtgcagattcagacggacgctagcggcgtggagattttggaggccgcaccggcactgggcgtggaaaccgcagcgctatcgaacgcgcttagtcttttccacgtagccaagctagtggtcatcggctcgtatcccgaagtgcacgagccgcgtgtggtcacgcatgccgcggaacgcgtctccgaagagtatggcacccacgcgcacaaaaaattgcgtcgcggttactacgcctacgatttggccatgtcgtttcgcgtcggcactcacaagtatgtgctggagcgcgacgacgaggccgtcctggcacgcctctttgaggtgcgcgaggtgtgttttttgcgcacctgtctgcgtctggtcacgcctgtcggtttcgtggccgtggcagtgaccgacgagcagtgttgtttattgctgcagtcggcctggactcacctttacgacgtgcttttccgtggtttcgctgggcagccgccgttacgcgactacctggggccggacctttttgagacgggcggcgcccgttctttcttttttcccggtttcccacccgtgcccgtctacgcggtccacggtctgcacacgttaatgcgcgagacggcgttggacgcggcggctgaggtgctctcgtggtgcggcctgcccgacatcgtgggctcggccggcaagctggaggtggaaccctgcgcgctctcgctcggcgtgcccgaggatgagtggcaggtcttcggcaccgaggccggcggcggcgccgtgcgtctcaatgccacggcttttcgcgagcgaccggccggcggcgatcgtcgctggctgttgccgccgctgccgcgtgacgacggcgacggtgaaaacaacgtcgtggaagtcagcagcagcaccggcggtgcgcacccgccgagcgacgacgctactttcaccgtgcacgttcgcgacgccacgctacatcgagtgctcatcgtggatttggtcgagcgcgtgctggccaagtgtgtacgcgcgcgcgacttcaatccctacgtgcgttatagtcatcgactccacacttatgcggtttgtgaaaagtttattgaaaatctgcgttttcgctcgcgacgcgccttctggcagatccagagtctgctgggctacatctccgagcacgttacgtcagcctgcgcttcggccggccttttgtgggttctgtcgcgtggacaccgcgagttttatgtctacgacggctattcgggtcacggacccgtctcggccgaagtgtgcgtgcggactgtggtcgactgttattggcgcaaactttttggcggcgacgatccgggtcccacctgtcgtgttcaagagagcgcgcccggcgtgctgttggtttggggcgacgagcggttggtgggtcccttcaacttcttctacggcaacggcggcgccggtggtagtccgctccacggggtggtgggtggtttcgcggcgggacattgtggcggcgcttgttgcgcgggctgcgtcgtcactcaccgccattctagcggtggcggcggcggtggtggtggcgtgggcgacacggaccacgcgagtggcggcggtctagatgccgctgccgggagtggtcataacggcggtagtgatcgggtttctccctccacgccgcccgcggcgttaggtggctgttgctgcgcggccggtggcgactggctctcggccgtgggtcatgttctgggccggctgccggcgctgttacgggagcgcgtgagcgtgtccgagctggaagccgtgtaccgcgagatcctctttcgcttcgtggctcgccgcaacgacgtggacttttggttactgcgcttccagcccggtgaaaacgaagtaaggccgcacgccggggtgattgactgcgcgcccttccacggcgtgtgggccgagcagggccagatcatcgtacagtcacgcgatacggcgttagcggccgatatcggctacggcgtctatgtggacaaggcctttgccatgctcacggcttgcgtggaggtctgggcgcgagagttattgtcgtcctccaccgcttccaccaccgcttgttcttcttcttccgttctctcttccgccttgccgtccgtcacttcgtcctcttcgggcacggcgacggtgtctcctccgtcttgttcttcttcgtcggcgacttggctcgaggagcgcgacgagtgggtgcgttcgctggcggttgacgcgcaacacgctgctaagcgggtggcttccgagggcctgcggtttttccggctcaacgcttaacgagtcacgtaggggaactacgtgggtaagtgacgtggatactagtaaaaaaagtgcgtcaaagttctcagcgtgtgacgtggatactagtaaaagggacgtcaaagctcactacgtgttgcgtgttttttttttttctatgatatgcgtgtctagttcgcttctcactcttcctctccccgttcccagcgcggtggcagcttggggggtgagggcaaattggggtagttggcgttgagcacgtctagcaggcccaggcccacgggccaaccgtccacggtcttacgctcggtcagcttgaggctaaacgagtgtgcctcgtcttgaccggtaaggcggaaaaagaagcgtgctaccagctgcaggcaggtatgccgcgtctgctggaagagcacgaaggtagcgggcacgtactgcacaatgtgcggttctttttcctcaaagagtaggtagagcgcgctgcagatcagccgccgggcgctgtggtgcagcagccggccgaagctttcgcgcacgttcactgcgtccaggtactggagcaggtcgtgcaggcacttgcgcgttaagttgcaattttccacgcatgaaataacggtacagagcgcgaagtgcagcaggttgtcggccttgacgatgccgcagcggtgtttgagccgcagatccgagagcctcacctgcgtgacgacgtcttcggtctcgagcaaaaacacggcggagtagcccagaaaggccgaggtgcacagcaactcgctgcggtactcggccatggaaaccagcagcccgtgctccgtgtgcagccacagcttgtcgccgcgcaccgtaaagtcgagcacttgcggctccatgatcatcacattctgtctagtgaaatccgtatggacctccagcacgccgcggatcatcagggcctccatttcgaaatcggccgacacgctctgggccgcgccgctcctcgtctgccgtgatcaagcggcgcggcgcggacctttcaagcgttcctgggccgccgctcgaggcagttcccctttctggcactccgcccgccgcttcgcggctcatttggcgccggcgcgccttctcgcggctgcaaatcagctccacgtatcggcaaaacttgctgtcgtcgtaggcggcggccacgatctcgccgaaggagagctgcaggtaggcttcgggtacggggtccagcgtgcctagcgccaggatgtgacacagatagggcagggtcacgcgctctaccgtgtaattggagtagacgatggcctcttcggccccttgatgcgtgaccagacgccgtaggcgaaaggtgcggaaatactcgttttcccacaactgcgtgaggaagcgttctagcgactcggtgccaggcacgaactgcgagaagaagctgttggccaccaggcggttgtcttccaccgccagcggacggaagggcgccgcgtcgcgcgccttgcgcacggcctccaacacgggcaggtggtagagttcggcgtcgcgcgcgcccaggctcatggagtcctcgcgccgcgaggcgtagcgcgtgagcaggtcgcgcagctcgcgcacgcgattctcccaggtctggttgagcgtgcgcaggtcctggatctcgtccacctgcgactggatctgctcctccaggcacttgatgacctgcttcttaaacaggtcgcggatgtcccgctcgggcgccgccgggccgggtggcggcggcagcagcccgacgtggcccgcgggtcctcccaccacggcgccgccgggtcccaccacgccgggtccacccggaccacgcgcgggtagtagacggttttggtccaccagcgagggggtcaggtcctgcagaaaggactcgacgctgtcctcgatgccgatgcgcgatttgctgtccgagacgttaagcaaaaacttcataatggactttttggcgtcgctgccccggtcgtgctgctccatcatctccaccagcttcttgcagttgagctcgtggcggctggcggtcaccactttcacaggaaaggtattgagcagctggcagatcttttggtggcggcagagcccgtcgtagcgcagaatctcctcgtgcaggtgtgccaccggcgtggtgaacagcagcttgtcgcgctcataagccagcggttcggccgccacgtacaagcggatgtgcttgccgcgcagctgcgcctccagccgctccgagcgcaccttcttgaagacgcgtacctcgggcgcgttggctacgcgcacggcgcccaggcgctcggccacctgcagcagcagcgccaggttagcctgcagcaggtcctgcgccagcgggtgtgtctcggtggcccgctgcacggccgcgcgtacaaattgcgcccgctcggccgcctcgctcggcttggttttcacgtccagcagcggtaccagtcccaccgttacgcaccaatccacgtagagaccatagtcgtcgttatcggcgtactgatataaaatgtcgcggagcgcgcccagcacgcccgtttgcacgctctggcgcaacgaggcgctccacaccaacagatactgctccaggtcctcttcgtccagcgcgcggtagggaaacagcgccgcgtgtaacttccactcctcggccacgcgccgcaccgtgatggtgtcaaagagcgtcttgcacactccgtagagcagctgcttgcgcagcacgcacgggtcgcgcagcacctggtgcatgctctggccgcgacacgtccccagaaagccgtgcagcaaccgcaggaagctcatcgtctggcccgtggggaaaatgtcgatgacggcctcgtcatccacgccgcggcccacgcccaagtacgacgacgccttgatcctcaacctctcgtcggctgccaagatcgaacggatcgtcgacaaggtcaagtctctctcgcgcgagcgctttgcgcccgaggatttttcgttccagtggtttcgctccatcagtcgcgttgaacgaacgacagataacaacccctctgccgcaactaccgccgcggcaacgacgaccgttcactcctccgcctcctcttctgccgccgctgccgcttcgtccgaggccggcggcacgcgcgtaccctgcgtcgaccgttggcccttctttcccttccgcgcgctgctcgtcaccggcacggcgggcgccggcaagacttccagcatccaggtgctggcggccaatctagattgcgtgatcaccggtaccacggtgatcgccgcgcagaacctcagcgcgatcctcaaccgcactcgctcggcgcaggtcaagaccatctaccgcgtcttcggtttcgtcagcaagcacgtgccgctggctgatagcgccgttagccacgagacgctggaacgctaccgcgtgtgcgagccgcacgaggagaccaccatccagcgcctgcagatcaacgatctgctcgcctactggccggtcatcgccgacatcgtggacaaatgcttaaatatgtgggagcgcaaggccgcttcggcctccgccgcggccgcggccgccgcctgcgaggacctctcggagctgtgcgagagcaatatcatcgtcatcgacgagtgcggccttatgctgcgctacatgctgcaggtggtggtgtttttttactacttttacaacgccctgggcgacacgcgactttaccgcgaacgccgcgtgccctgcatcatctgcgtcggttcgcccacgcagaccgaggcgctggagagccgctacgaccactacacgcaaaacaagagcgtgcgcaagggcgttgacgtgctctcggcgctgattcagaacgaggtgctcatcaactactgcgacatcgccgacaactgggtcatgtttattcacaacaagcgttgcaccgacctggactttggcgacctgctcaagtacatggagttcggtatcccgctcaaggaggagcacgtggcctacgtggaccgcttcgtgcggccgcccagctccatccgcaacccctcgtacgccgccgagatgacgcggctttttctctcgcacgtcgaggtgcaggcttacttcaagcggctgcacgagcagatccgcctgagcgagcgccaccgtctcttcgatctgcccgtctactgcgtggtcaacaaccgcgcgtaccaggagctctgcgagctggccgacccgctgggcgactcgccgcagcccgtcgagctctggttccgccagaacttggcgcgcatcattaactactcgcagtttgtcgaccacaacctctccagcgagatcaccaaggaggcgctgcgccccgcggccgacgtcgttgccaccaacaactcctccgtccaggctcacggagggggaggatctgtcatcgggagcaccggcggcaacgacgagacggcgtttttccaggacgatgataccaccaccgcgcccgatagccgtgagacgctgctcaccttgcgcattacctacatcaagggcagttcggtgggagtcaactctaaggtgcgggcctgtgttatcggataccagggcacggtcgaacgtttcgtggacatcttgcaaaaggacacgtttatcgaacgcacgccctgcgagcaggcggcctacgcctactcgttagtttcgggcctgctcttctcggccatgtactacttctacgtgtcgccctacacgaccgaggagatgttgcgtgagctggcgcgcgttgagctgcccgacgtgagttcgctctgcgccgctgccgccgccacggccgccgctcccgcttggagcgggggagagaatccgataaataatcacgtcgacgcggattcttctcagggcggccagagcgtgccggtatctcaacggatggaacatggccaagaggaaacccacgacatcccctgcctgtccagccaccatgacgactcggacgccatcacggacgccgaactcatggatcacaccagtctgtacgcggatcccttttttctcaaatacgtcaagccacctagcctggcgctgctttctttcgaggagacggtgcacatgtacactaccttccgcgacatttttctcaagcgctaccagctcatgcagcgtctcacgggcggtcgcttcgccacgttgccgctcgttacctacaatcgccgtaacgtggtgttcaaggccaactgtcagatcagctcgcaaaccggctccttcgtgggcatgctttcgcatgtgtcgccggcgcagacgtacacgctcgagggctacaccagcgacaacgtgctcagtctgcccagtgaccgccaccgcatccaccccgaggtggtgcagcgcggtctttcgcggctggtactacgcgatgcgctcgggttcctctttgtgctcgacgttaacgtctcgcgcttcgtcgagtcggcgcagggcaagagtctgcacgtgtgcaccaccgtggactacggcctcacttcgcgcacggccatgaccatcgccaagagtcagggcctgtcgctcgagaaggtggccgtggactttggggaccatcccaagaacctcaagatgagccacatctacgtggccatgtcgcgagtcacggaccccgagcacctcatgatgaacgttaacccgttgcgactgccctatgagaagaacaccgctatcaccccctatatctgtcgcgcgctcaaagacaaacgcaccacgcttattttttgacacaacaccgtgtaagcaaaacgtgactttattgagcagggtaaaaaccacgtacaagaaccacgttgtctatccccccaaaaaaaaacacaccgtcagggaacacatcgcctatagatagcggcactttacataaaaccaccgtacctgcatcacggtggctcgatacactggaaattcaataaaaaccaccgtgtccacgttacggtacttgccgggtcagcgtccttctcttgagatttctgttcgcaaacttatccgtttccccggtccgcggtgtctcctcgcgaggctgacagtctacgagtggtatctacaagagaaagaaacccgggtgggagcgacgccgtcgctgggtatcaaccccgcggctgaccgtcgtccggtaaaggaacaacccgtcgtcgcaagccgggttcgaccaagagaaaaaaacccgggtgcggggggagacgggtcgtcctttggtcgttcgcggacggcgtacatgccgcgtgggtcagtcgacggcgtcgctccgtgcggtcggtcatcattctgcttcacatatatgggttgtttgtgttttttttataatgaatacgcactcatcctatccgtgactgcgcgtgtggcagagaggatgccttataacatgtattttgaaaaattgccaacagctataatttctctcatgtagcagaatagagaccttttgtcgtctttttgtttgtcattacttgttttccagggaattagagagagggaaccgcgcctccggcggcggtgcccgcggaccccggccccttctcgcgtgcgcggtgtgactggttgagcgaatgagcagctaggcttggtggtgctccgcgtgcgggggagaagacgattaacaacaaaaaataagtggaagtggccggtgggtctttgtccgcgtgcgcgcccatccgtcgccgggaccgagcagaaagtgatgtggtggtacattgattttttccttgacaggaaagaaaaaaaagagttttgttttcctatgtgagaggagaaaggtatgtgaggagatgttcgatgatcgtatgttacagttatgctgtaaggaagcttttatcgtgcgtcctgtttttcatttgatgtatatgacacaattgaaacctatcgataggcgtatatcgaggattcatcaattcttagaatcgtcgtctttttggctaattggactttgcccatgttggttgtcattcgtggcctgaggtcatcgtcgtccacgacgacgtgtctatagcgtgcggtgtgatcattgtgtcgagccagagaaagcgcgcctcgcacgacgtttgcggatcggctcgcgggtgtgtggaattcctaagaacataatcagctggtcgtctttctttgatgtgttgttgtcgtcgaggtcttgcttcgttttcttttttctttttagtcgatggaacttttcttcggtacgggttcttgttatggaagcttgtgttttcgaacatgaattcgaaaaaataaaaaggcctatcttcgtttcaaaaaaaggacagatatcaatcttcttaacttatatcatggtaaattcagaatcctatggtgtcttattatctctaaagtagtcaacattatggtctaacttgtatttccctgacgagatatatatgatccttataacctggctactatcatgaacaacaatatccttacttacagtcatcttcgtgagttaatgaagtataatatcggtcatctatcaacttatctgctatgtaacgtacccttttaggtattttgcgtttcttaacgagtgtacccgcctgtgtgaggcgaaactctgagaagtctaccgagtcgagttacaagtcactaaaacacttacacgagttatctatactaaaatcactatctatgttgtttgcttacctaattattatcctacatgacgaagctacctcccaacgtaaggtagggggagaggagacagaacaataaaaagtaactaatgtttcttagaacttacccgctaaggacttaccaaactatattcaccaaaaaacaacagctacgtgtttcatttgttttaatctaccgaagtaaaaaaaaaaaagatgattagctatccagaacctacttacttcttaatgttttaactaaggatgcctatgggattggaaaaaaaatcacagcaacttgctactaatcagttgacagcgaagagactcataacaaagatttctgggtaatacggttataataatgcttatggactaaaggatacttggaaaaaaagaacgggctatgactatagagattcgtcgagatattaaacttcaaataggcggctatcattcatggttgtggtgactatatcgtggagaaaaaatgtgatcgttagttagctaggtgagacttacagctatccatccgtctagtttttcgttgtaatgatgatagtacgtctatggtggtgatcgattttggttaacaatttgttcgtttaaaggcttaatgtacttatgctacatgatgtattattctttgattcatcgttcctcctaagggggtgtatgtatgtatgtactagtcgtatagtgttcctaacatcatgattattcagactatggcttcatctatcgtgtctaaagttcacttattctactattactatatatatgcactactatgtaactaggatatggtcctataaggtgtcttctatcacggtggcttgtttatcgcttggcggttacgagcaagagttcatcacggaccagccgtgaggcagggcacacgcgggtcggcggcgatgatgtcccccgcgaaggggacaacaaaaacaagacaagaggccgccggccgcggccacggacgcgtagcggttacacaatgtttggttgagcgttttgtttcatcgtcgtggtggtggttttgttgttctctgtatatatcgtgtggtggctttatcgtcatcattattatcatcattcttgtttccatcatcacgatgagttttctccgttttcctctcctccagtggtagtcgtgtatcatcatcaatcatcgtagtgacgtcgttgctgctgctgctcttgccttcatggcggtatttctcttcctcccccctaaccccatattaactcgtgagtgtgatggttagagtggctgcttgtttttttttcttttctctttggaacaacaaaagaggataaagatggtcggtgaatgtattattattattatcatcattatgatacggtcgcggtcttcttctccgatgacgaaacctgcgcacatcgaagaaaagacgagcgcgcgaaccgatagccgtccgtctgggacgaaggagaagatgatggggagaggaggagagccccagaagccagagcgagaagggagacgacagacatacgtcgtcaccgtcctctggaggaggcacggcggcgctgtttgttgtttggatgcttgattatatcctgttctatggggtagattattatcaataggcttggttttcaaaggtcagcctgtgtattgtcgtgtcttttttttcgttctcatgatcgcggagaccacacagacgtgcgcgtctcccaatggctaggcgttctttttaggtagtaattttttgatcttttttttttcttaacaagtctggcttgatttcttttatctatgatcgattcttctttttctcgggggttgcatcttccgtgaaagtaaagtgacactactctaaatggtaaccatattatctgttgattaggagaaaaaataattttttcgcacgaaatcgatcctaagtgaggtgatttacttgctatcacacgaaatgattatcttttgctgctaacgtactgaattttttaacagaattgcttctccgtaactatttccgcagattcagacagattgtcaaaaaaaaatacggcacagaaatagtgggtctgtggcttttggttcgtgtacattcgcgtttgcgtgtcgagatttctacggtatgtttattcttcctgcgatgatgtagggtccttggtgtaagtaggatttcgagtatctctcttagagcgaacaaaataatcaaaaaacaacagctaggaaatcgagggttactctacgataaagtgtctctacaaagtgaagaatgttacgttgtggtggaataataagactcgcgtgatcgatgagtgatcgagagcggctcgaaccttctttaagagctttgtttagtgcaactttaaattacaaggagtagaaagctgaaatgaatctatgaaggtgctattctttgaatatcttactttgtacgcttcacattcgttatttggatagagagttgtctagagaaaatctgtgattctctatgagtgttatttttattatccttttggggactacgatttttcttcttgttctacataccactactactcgtaatcacatacatggacgaaaaaaaaattcgtcaggcagtagataccagattctccgacgttacggcgtctttttttcttttgagagagtatctgctgagattgtccgtggtgtatctagtcgctatttttgttgttactagtagttttgcacacagtttattcagtataatttttcttcttgccatgatcaattgagcccaccaccttttttttttagagaggaggaatttcgtcttgatctccagccggagacaacggcggcggtggtggtggcgggagagatttcaaggcaatgaaaaaaaaaatttcgttttgccatcaagtggtgacgataacccgtcagattgataattggttcctacagaaactattctaaccgcggaagaaagaaattgaaaaaaaaaattgacaaaaacatcataacataaaggaccacctacctgggacgcgcagttgggcggcggactggggcggcatgctgcggcgatgctgtcggtgatggtctcttcctctctggtcctgatcgtcttttttctaggcgcttccgaggaggcgaagccggcgacgacgacgacgacgataaagaatacaaagccgcggtgtcgtccggaggattacgcgaccagattgcaagatctccgcgtcacctttcatcgagtaaaacctacgttggtaggtcacgtaggtacggtttattgcgacggtctttcttttccgcgtgtcgggtgacgtagttttcctcttgtagcaacgtgaggacgactactccgtgtggctcgacggtacggtggtcaaaggctgttggggatgcagcgtcatggactggttgttgaggcggtatctggagatcgtgttccccgcaggcgaccacgtctatcctggacttaagacggaattgcatagtatgcgctcgacgctagaatccatctacaaagacatgcggcaatgcgtaagtgtctctgtggcggcgctgtccgcgcagaggtaacaacgtgttcatagcacggtgttttacttttgtcgggctcccagcctctgttaggttgcggagataagtccgtgattagtcggctgtctcaggaggcggaaaggaaatcggataacggcacgcggaaaggtctcagcgagttggacacgttgtttagccgtctcgaagagtatctgcactcgagaaagtagcgttgcgatttgcagtccgctccggtgtcgttcacccagttactttaataaacgtactgtttaaccacgttgcgtcgtgacgttgtttgtgggtgttgctaggcgggctggaaagatgatgtataaatagagtctgcgacggggttcggcgctctgccggctgcggcggcactcgctccacggcctccgacgagcgttgcgctcgcgctttgcgccgccgcgtcatggatctgcctactaccgtcgtgcgaaaatactggacttttacgaatcctaaccgcatcctgcatcagagcgtcaatcagactttcgacgtgcgccagttcgtctttgacaacgcccgtctggtcaactgcgtggacggcgatggcaaggtgctgcaccttaacaagggctggctctgcgctaccattatgcagcacggcgaggcttcggccggcgccaagacgcagcagggcttcatgtccattgacattacgggcgacggggaacttcaggagcacctctttgtacgcggcggtatcgtctttaacaaatccgtctcctcggtggtgggctccagcggacccaatgagagcgcgctgctcactatgatttccgagaacggtaatttgcaagtgacttacgtgcggcattacctgaaaaaccacggcgaatcctccagcggaggcggtggttgcggtgccgcgtctaccgcctccgccgtctgcgtgtcctcgctgggtggcagcggcgggactcgcgacggcccttctgcggaggaacagcaacggcgaaggcaggaacagcgtcacgaagaacggcgcaaaaaatcgtcctcgtctgccggtggtggtggaggcggcggcactggtggtggcggtggcggcggcgggagcggcggtcagcactcctcggactccgccaacggactgctgcgggatccccggttgatgaaccggcagaaggagcggcggccgcctccctcctccgagaacgacggtgagtcccggccctcctcgcgtcacggtgctttccgagtggactcgtgagccccccgtagcgcacgagcgagcaggcgagcggtgttggtgcgctggtggttgtgtggatgataaccatgtgctttttcgtgcgctatgtgtcgtcccgtctgtaggctctcctcccctccgggaggcgaagagacaaaagaccaccgcacagcacgaaggccatggcggcggcggcaagaacgagacggagcagcagtccggtggtgctggcggtggtggtggcggcggcagcggccgcatgtcgctgccgctggacacgtctgaagcggtggcctttctcaattactcgtcctcatcctccgcggtctcttcttcctccaacaaccaccaccaccatcatcaccaccataacgccgtgacggacgtggccgccggcaccgacggtgcgttacttctacccattgagcgcggagcggtggtttcgtcgccgtcgtcgacgtcgccgtcgtcacttctttcgctccctcgacccagcagcgcccacagcgcgggcgagacggtgcaggagtccgaggcggcggcgacggcggcggctgcggggttaatgatgatgaggaggatgaggagggctccggctgaggcggcggaggcaccaccgcagtcggaggaggagaatgattccaccactccagtctctaactgccgtgttcctccgaattcgcaggaatccgcggcgcctcagcctcctcgcagtccgcgttttgatgacattatacagtcattgaccaaaatgctcaatgattgtaaggagaaaagattgtgcgatctccccctggtttccagcagactcttgccagagacgtcgggcgggactgtcgtcgtcaaccacagcagcgtcgcgaggaccgccgcagctgtctccacagccggcgttggccccccagcagccgcatgtccgccactcgtcaccaccggtgttgtaccctcaggttccgtcgccggtgtcgcgcccgttgccgccgcagtcgaaacaccagctgctcctccccggcccgtgtgtgaaatcaagccctacgtggtaaaccccgttgtcgccaccgccgcggctgccagtaactcttcctcgtcttcttcggctccactgccgccgccgccaccaccgccgggcggacgtcggggtcgggcccggaacaatacccgaggaggcggcggtggtggcggtggtagaaacagccggcggcaggccgcatcgtcgtcgtcctcctcctctcggagatcgcgacggagaaacaaccgccacgaggacgaggacaacgatcctctgctccggttgtcgcaagtcgccggcagcggccgccggcgagggccctcgttcctcgaggacggactcgaaattatcgatcccagcgaggaggctgcgatcgccgccgcctcgatcgcggcgtttttcgacgattaaaaaaccgagccgagaccggaaaaattatgaaacaggacgcgcttggacatttgggtttccacccctttcggtgtgtgtctatatatattgtggtcactgattttttttttacaataaagagatagacatcacagttcaccatcttgtctccccggtgtgtctattatcatcaatcacccacagagtcgccagtccatggtctctcggtaatgcgtgtccagatacgcgttggccagtataaagtggtcgttgcccacgaaggcgcgggtggtgttgcgcggcgacgggtggcaggacttaagtaccaagtgccgccgtcggtcgatcaggtactcgcaggtgtgcgcgtcggcgccccacagcatgaacaccagatgctcccggcgctctgacagcctccggatcacatggttactcagcgtctgccagcctaagtgacggtgagatccaggctgtccgtgcaccacggtgaacacggtgttgagcagcagcacgccgcgtcgcgcccaggcgtccaggcaacccgaggccggacgctgaaacccgtccaccgtacgcgccagttcgcgaaacacgttgttgagggagggcggcggcggtcggcccgccagcgtgccgaaggccaggccgctggcgctgccgtcgcagtacgggtcctggcccacgatcaccacgcgcacctgctcgggcggacacagatagctccagcggtgtacgtgctcgggtgccgggtacaccatctcgagttgccgcgcgccttccaccgccgccaccgtgtcgcgcagcagcaccgtgtcgtggtcgggcaagctgaggaagcggatccagtcggcgctcagacaaaacacgcgagcctgctcgtcgggggttaacagagagcctttattatcagcaatgttagcgagcatccactgcttgagggccatagcgcgagtgagccggcaggttgacgcgcgtctgcttcagctcgggcggcagtccggcgtagtatttatctaggtggcgtagcagcggcgggtccagctggtgacgcaggcagaattccttcaccgcgttgtacaggccgtaaaagagcgtgatgccctcgggcgcggcagcggtgctcacgggcagacgcacggcgcggttggtacgcgtggcttcgttgcgtatggccaccaccacgttaaagagagacggtggcaccagctcgaagcctaacacgtgttccgtgaagatgctgcgcccgtatgacagtcgcgtgaggtcgtagccgcggcacaggtcgtccacgcacgtgtacacggccggcgagccatcgccgcactcgctgtagccgcgcattaccgtcatccagcgcggcgctgtgtccgagcttaacagcgtcagcagggcccgcaattgatccggattgttgtacagcagggccagagtgtccaggaaagcatcgtccaacagcacggagttggcggcctccggcgtaacgggacggtaacggataagttgcgatagcgggccatcgcgcccggtaacattcaccaacgggcgcagccaactttcatacttgtcaccctgaaacacctcacccaacaggcatcggcgcgttagttcggggcactccgcggggactttctcggcggcggtaggagcgacgctgacggcggctgaggaaacaatggacagcagaaggcaacaccacagcagtatcaccggtccaggtgagaaagagaagccgcaatccgggcggcggcacatcaagtctgcggcacgatgagagtgtgacggtaaggagccagttggcgccgaaagttggcactcaggtcttcgatccctaaaacgttatatattgcatccagcaggtgagccaggctaaacggattcacgtaccaggtttggttacccgcgacgatgacggccagaccgtgggcgctacagttggagaggttcctgggtacgaaggtaactgagtcgatgtcgcgccacggggggaatgagacagacgactggcgcacgctgtaatcacaactgtgattgacgtattgtagcgtgtaatttaggttgcactcagcctcgaagtagagggggaaccacagttcgtcgtactcgtcgtcgtcctccagttctggctcttcttcatccaccgcaatgtctacgctgctttgagattcctcttcgtacaggatgattgacaggttatggctacaaaggtcctgggcgggaggacgcgtgggagcgcgggtggtggtaatgttttccagatcaaaagttggagtgtagtcggatgttacatccccgttgttggaggtggtagaagttgcggccggtgtcgcggtggtaagtatggatacagaaggggagggggaagtagcgttcgtaccgatggttgtggtattattattccctgtgtttcttgttccagaaaccgttgacgttgagatgggaatcgacgtggtgctggacgtcagattgctgaccgaggaaaccgtggtgggagtggtgacggtgttactcgtggttgaagtgacgttaggggaggtagtagtggtaccggtggtggcgacggtagtgtttgtcgtggcggcggcagcggtggtaccggtaacggtggtcgcgttggtttccaccgcttcacacagtaagcaaaagcacagagccaggaaaagcaaccagccccgccatcgccgccgccgcttcatgaggtgggcaggcgaaagctggtgaattcgttgtacagcggcaagtggggcgccgcgatcgaagggtacgtcaacaagctgacgttgatattaaatacgtctggctgcttttctacgatggaagcgcacagggttacggcgtcaaacaggtctttcttggtggcgcccgagacccacatctggtatacacccgtctcgtggtacgaagtagagcgcggcaccaccggacggatgcagtccagaacgcggttgggatcttggtgaaagaatttgaacgtggctacggcctgtggcgtgtgcggcatcgtctgcgtgatgagctgctggcccgctaacacggtgacgttgtgcaacttgagcagggcactcttgagggcctggaaagcgttgccgcacgaggcgctgatctgcagctgcacggccgtggagtcgtgcagccgcatgagacgtgacacctcttcgaagacgtacttatacttactggcaaagagtggcgcgtatcgacagtcggccggcaaaatgtaggtggcgttgccgccgttggtagccacggcgggcgcagcggccgcggaggccggcgtaaacagcgtcagcggccggtggtggctggtaaggtcgatcatgggcggcgtggtgaccgtggcggtggcgggcatgacggggtttgcggcgacgggcactccggccacagcggcggccgcggcggccacggcggcgctggccgagcccacacccgccggcagtcctccgctacccatgacgccgccgggcagagcgtcgcccagacagacttccacagtggcgggcgcgctctcggcggtcagtacggtttgccgatcgacctcgcgacgaaagctggtgaggaactcactatgatccatggccgcagggcccgagatcccgggattctgcgggtgctgaccgagtgcgggccgagttatatggaagacgattagcttggagcggagttttgcgtccctagctgacctgcggatcagcgacgtaccatagggatagactgtgagcggcggccgcaacggcggggtcggccgccgttcgtcgtcacggggcggcgcgagggaggaggaggtggtgggtacgatcttgacgtggttgacgtcctgcccgtccgggggaatacgcaaaaaaacccgtcgcggcgctaccacgatggtgcgatgggtctttctcttgttggccggggccagggacttgcagatgcgtgtggagccgtagacgatctggacgtggtcctgggagaacatgaccatcgccgccaacgctcagcggggggacgtattgggaacacagaggatgagggaaaactccgtagaagtcagcgaaataaagacaacacagcagccactcctctcgtctcgggccctaccactgcttgaagtagggcaccgggtgtttcttttcctcaacgggctcctccagtctcttataggaccagtcccgccggcgcgccagcatgtaggtcacgtacaaaagaataatcaccatgaacaccaggaaagccagcacgccgtaggccagcagccggtcctcgaacagcgggtcgctcttgataaacacgtaggtggtggtaaaacttcggcccgcgatctgaacgtggagacgcacgacagtatacgtgccgttgaggtagaagacaaactcgcgtaaccgttgtccgttatacgtcacgttactaatattccacggcggaatgagctggttgccctgatgcagatgcacggtgctgttggggtgatagaggctgctaccgttgagcaagcagtgttcgtgttcctgaagcagcacgcggacccgcatcgtggtagcgttcaagcgagtcccgtacacggcgtagatgggataggtgaaaaggtcccaagtggcgttgtgatggcggccccagctgaagaaagagcacgtgtactcagtggtctcctgcggcctgagtcccgagataagcagctcttgagcagtagcgttgtaggagagatgtagttttcctgtggaaaaaattaatgagttgtttattttgttagcaggttggcgagggaggaaggagaacaaaacagaaaggtacgtgttacttacctttatcgttggagggaaaagcgctaagataccccacctgagtgaagggacccttgcagtctgtccgtgcataacaagtaactgataaaatgtctggatttttggtattattcaacaggattactttgcaggtggcgtttagagacacttggtcgtagctgtagctggcttcgcaattcacagtatacaggtgcccctctttctgcgtcgtggctatcacggaggtggaggcggacgaggtagaggtttgtaccgtggtggtgacagcagaagtgacgttgttagaggtacttattgacgtagtagacgtgacggtggtattactaggggaagtgacggcgcttgtggtgctacttttcactctcgggtgcatgtcgcccaagagcgcaactacgagcgcgatcgccagcacggaacacatgttgccgtgtgacgagacggcgtgtggacgagctatatgtggcaggaggtcgcgtcacctcttgtgacgcctaaacgtccagctccagataaaagaggcgttaataatgaagaccacaaaaaccacttgcgtcagtatgacaatcataaaggctcggtgattgctacgcctaaagtacgcgggattatccaccagttcatcctgctgaacaaagtggatgattgacgtgctggtgttaccggccgtcgtattgatcatggattttactaagaaagttttggcaccaaaagtcccgttagagccccagcaggtaacgctgccgttcacataggctcccggtgcccctgtcagcatgcgtttcagttcatgagtataatttttcctatcgttatacatatcatcactgtagttgactttgctggtgagaaactgtgtgttctgtggaatactgatcatcatccccgaggccaaaaagggcgaatcgcaagctgtagtgttacagaaaatagtcaggttagtgtcattatgctcatacatataagccacgctaacctggggctcataccacccaatcgcaaccgccagcacgtcccatctcccgacatttatcaccgccaccactaacaacgtcacccccgcacggtacatagttaccctctcgacgtcgccggctgtcaatgacgtgcctgcgtcagtggctatgatttatagcttttggacacaaccgcaacggatctgtcgtaatctaccttccacagggccgccgcgacgatgctgaacgacaggatcagacagacggcgtataggagtcctaggtcggcgtcgacgcggcaagtgcggatgtctcgcagggtgggtagatgggcgatgcacaactctttctccccccgcacgtacatcccatctcgtatcagcagccgtagcgtagcattaatggtcagcggggtaaccaaagaaatcacatagggatgtgtacaggaagtacagtgacgggtatccgtgagatgtaagtcatcacccttctcactgttatcatgaaagaccaggactcgggtaagacgacccgatgaatactggatctcccaccacagtctttggtccaacaccgagagggcacaagagattctaagtctccctgggttgggggagcagatgtaagccccgtgtgtgcccctcgccatcagaaccatacacatgagggggaaaaggacaagtatccgggaccacccgcacccccacatcacgagaccagagacggagatgtataaaaaaaagctacttttattaaacagcattctcaccacacgttaatactgtcacggggaatcactatgtacaagagtccatgtctctttccagtttttcacttactgagacttgttcctcaggtcctggatggctgcctcgatggctaggctcagggtgtccaggtcttcgggaggggtctcggtgggctgctcaaactgccccacgtcgtaggccttcgcggccgtctcgtagataggcagcatgaacccaccctggttggtggagaagatgcgcaccatgacctgtttgggaaacttttgcatcaggggcaggcacaggttgagagcgcccaacaggtccacgggggtggcagcgtggatgatcatgttgcggtaatcggaagaacgggggcataattggtgggtgtgcaattctttgaggctccacgcggccttgacgccttcgttacaagcatcggccgtgcgctgcgccacttcgggtgggtgtgtcacaggcatggtgtgctccatgagaaagggagtggagagggccaggttgcacatggtgcccaggcgacaccgcaccgcatccacctcactcttcacctcatgattgcgggtgtagatgatctggatgcccttgttgttcacctgcatggttttgcaagctttgatggcctcatctaacacctggtgcatactgggaatcatgaagggcaggttcttgtattcaagagagcgattggtgttgcggaacatgcggctcacctcgtcaatcttgacgcgaccccgccgagtctgcacgttgggtgtgcagaagggggtgttcttatctttcatgatattgcgcaccttctcgttgtccaactcggagatgcgtttgctcttcttcttgcggggtccggtgctcgccccgccgctgctctgatggccgcagctcagcagagaggaggaggccgcgccaccaaaaccgccgcgcccatggtggctcgaggtcacggatgctcctccgccactgctgcatttcatctcctcggactcactctccgagtccgaagccgaactgcaggaggaggaagacgaagaggaactatcttcatcgggccggcccaagggatcgggaagaggagggtggttcatctgggagagcgggtgcgtgggagaggtcactcgcggcgtgccgctgccggtggaaggggaagacgcggtagcaccgcgggtttcgacttcttcaccctgttcttcctcgctatcagagatcacgatacagccggcggtatcgataatcttgttgcggtactggatggtaaagtcgggctcgggcttgatgtcttcctgtttgatgaggaggggcagcatgataggcgcgggaggcacgggcggtttaataatcaccttgaaaggacgcgtggttttgcgcggtttcttacgcgggctgagctcgggagtagcggatgccccggggagaggagtgttagtaaccgcgacgctggtgggggtcggcttgttaagaggggcgctgctaacgctgcaagagtgggttgtcagcgtgtggccggtgctactggaatcgataccggcatgattgacagcctgggcgaggatgtcacctgatggtgataagaagacacgggagacttagtacggtttcacaggcgtaacacgtttattgagtaggattacagagtataacatagagtataatatagagtatacaatagtgacgtgggatccataacagtaactgatatatatacaatagtttactggtcagccttgcttctagtcaccatagggtgggtgctcttgcctccagaggtggtgggttcctcagcaccatcctcttcttcctctgaggcaacttcccctatctcagacactggctcagacttgacagacacagtgtcctcccgctcctcctgagcaccctccccctgttcctcatcactctgctcactttcttcctgatcactgttctcagccacaatcactgaggacagagggatagtggcgggtacaggggactctgggggtgacaccagagaatcagaggagctagcaccagcggtggccaaagtgtaggctgcaatagcatcttcctcatctgactcctcagcgatggcccgtaggtcatccacactaggagagcagactctcagaggatcggcccccagaatgtactgggcaaagaccttcatgcagatctcctcaatgcggcgcttcatgacattgataacctcaggcttggttatcagaggccgcttggccagcatcacactagtctcctctaagatatagcagcacagcacccgacaaaactcacttaagagagagatggacccgtacatggtcatcatgcaagcgtcactggtgaccttgtactcattacacatggtttccacacatgtagtgaggatatccataaatatgtgatcaatgtgcgtgagcaccttgtctctctcctcatccaaaatcttaaagattttctgggcataagctataatctcatcaggggagcactgaggcaagttctgcaatgccgccatggcctgactgcagccattggtggtcttagggaaggctgagttcttggtaaagaactctatattcctgtagcacatataaatcatttttctcttaagttcatccttcttagcacgggccttagccttcagtgcaccccctaacttgttagcggcgcccttggtcacatcatgcagctccttaatacaagccatccacatctcccgcttatcctcgggtacaatgtagttctcatacatgctctgcatagttagcccaatacacttcatctcctcgaaaggctcatgaaccttatctaagatatctaaggcattctgcaaacatccccccatcatattaaaggcgccagtgaatttctcttccgtctgggtatattttttcagcatgtgctccttgattctatgccgcaccatgtccactcgaaccttaatctgtttgactgtagaggaggataacaacacatataagtatccgtcctcctgactcatttatcgctatctcgatgccccgctcacatgcaagagttaatcttcactctatctgacatacacaagtaaatccacgtcccatgcaggttagtatatatcacatacatgtcaacagacttaccgagttctgccaggacatctttttcggggttctcgttgcaatcctcggtcacttgttcaaaggttttgagagattcttcggccaattctgggaacagcgggtctcccaggctcagctgactgttaacctccttccttaacatagtctgcaggaacgtcgtggccttggtcacgggtgtctcgggcctaaacacatgataaacaaagtcataagcacatgggtcacatacaggaaatatgtatataacattaaagatataactttttattaaaaaaaggggaacacaagtcccgacacgtaccgtggcaccttggaggaagggccctcgtcaggattatcagggtccatctttctcttggcagaggactccatcgtgtcaaggacggtgactgcagaaaagacccatggaaaggaacagtctgttagtctgtcagctattatgtctggtggcgcgcgcggcagcaacgagtactgctcagactacactgccctccaccgttaacagcaccgcaacaggagttacctctgactctcaacagaacacaactcagctgcctgcttcttctgctgctgctgccttaaatcttccatctgcgtcagcggtgcaagcccattccccgagctcattttcagacacataccctaccgccacggccttgtgcggcacactggtggtggtgggcatcgtgctgtgcctaagtctggcctccactgttaggagcaaggagctgccgagcgaccatgagccgctggaggcatgggagcagggctcggatgtagaagctccaccgctaccggagaagagcccatgtccggaacacgtacccgagattcgcgtggagatcccacgctatgtttaataaaaactgcgggcactggggacggtggtgttgtatatgtgaatttgtaaataataaatgagaccccatcctgtaaaaatacagagtccgtgtcagtctctgaaggacagagtattggcatatagccaataaagatagttgtggcaaagagccatgttatggattagtaatggaaagtatcgtcaccaataggggagtggtcaataatggtcaataacccacacctataggctaagctataccatcacctatagcataaggaagcgggggtgtatagaccccaagccaaaaacagtatagcatgcataagaagccaagggggtgggcctatagagtctataggcggtacttacgtcactcttggcacggggaatccgcgttccaatgcaccgttcccggccgcggaggctggatcggtcccggtgtcttctatggaggtcaaaacagcgtggatggcgtctccaggcgatctgacggttcactaaacgagctctgcttatatagacctcccatcgtacacgcctaccgcccatttgcgtcaatggggcggagttattacgacattttggaaagtcccgttgaatttggtgccaaaacaaactcccattgacgtcaatggggtggagacttggaaatccccgtgagtcaaaccgctatccacgcccattgatgtactgccaaaaccgcatcaccatggtaatagcgatgactaatacgtagatgtactgccaagtaggaaagtcccgtaaggtcatgtactgggcataatgccaggcgggccatttaccgtcattgacgtcaatagggggcgtacttggcatatgatacacttgatgtactgccaagtgggcagtttaccgtaaatactcctcccattgacgtcaatggaaagtccctattggcgttactatgggaacatacgtcattattgacgtcaatgggcgggggtcgttgggcggtcagccaggcgggccatttaccgtaagttatgtaacgcggaactccatatatgggctatgaactaatgaccccgtaattgattactattaataactagtcaataatcaatgtcaccatggcggtcatattggacatgagccaatataaatgtacatattatgatatggatacaacgtatgcaatggccattagccaatattgatttatgctatataaccaatgactaatatggctaatggccaatattgattcaatgtatatatcgatatggattggccatgtgccaacttgatgtcgcctctatcggcgatatggcctcatatcgtctgtcacctatatcgaaactgcgatatttgcgacacacagaatcgcccaggtcgccaaagtcgtctatcgccatcccccgtaaacgatataagcgctatcgccagatatcgcgtatgcccaaaaatcacttttggaaaaatggcgatatcagttacacagagactcacatcggcgacattttcaatatgccatattttcaaatatcgatttttccaatatcgccatctctatcggcgataaacaccactatcgcgcgacatgaatttagtcggcgacagaaatctcaaaacgcgtatttcggacaaacacacattttattatattatttcccgtgacgcaggctagttggcaaagagccgcacgctgaactcgaggctccgggcgtgcggcgccagcgaaccggcggcgttgaacgtggtccttttgttggtgccgccgcgacggttctgacgtctaaagtcgctgatgagcaacgacacctcggtcacgttgattctgcaagcacaggttccgaacgtcatttcacaccccatgcggttacctacccgttacccgttcgcccttaccttcccgttgtcatacacctttagcgcgtaccctcacctcttgagcacgtcaaagttgtccaagccgtggctcgcatcgtagtggtagttcaacgtgaggtccacgagctgttccacatacttgtaacgggtttggtcgggcagcgcgcgagagcacgcgtcccagtaatgcggtactcggtaataatcgtttttttctgcggtctcccgctggcactgacccagcaccacggcgcacagacaaacagacagccacacccgatacagccgcatgttgcagactgagaaagagagctttattatgagacatcatacacatagtataggcgaggtaatggggcggggaaagagttggaaccgaaagacaaaaaaaaaagcctagtcgtactcgggatctctgagcgagacggattgcgtagcaactttcattagtttgggaatctgccagctggtgctgttggaaggttcttccatttccgaggcggtcagttcatcgtacaccgagacgtagtacctgatggggtcctcctcattgtccgagaggtgagattcgatggtcaaaggcgagcctctcccataattgggattcacgaacgacgtgtccaagttgccatcctttctgaaatagatgacgttctcaggatcatgtttcatgcgctcgcgggccgcggacgcctcctcctcctcgtcccagtcccgagtttccaaccgctgataagggctcgaggaacaaaatccggcggggatctgagaacctcgtcgggaaccgctgccaaacgggctgctgccgccactatcgtccgtgtcgtccaacaggttgacggcctcttcgtcggcgaaacgaaagcggcccgggtgcttgcaacacgaggagtaaactaccgcgatgagtaccgctatgaagctgaaaatggaggtgcctgtcacaatgtagaagaggatagccagcactttcatgatttcgtcattgcgcgcgtcgtgaacggaagattcgcgggcggtggtcatgttggtttcggttgtaggttcgctactcgtagtgctctcgacggtatttctgctgctggtgctagtagggacgtttgtgctgctggtcatatttgtagcgtcgctgaagtccatgtgaagcagcaacccgaacgcgaccaggaccaggaatgttgcgcgaaggagaccccgcggggccggcattcttgagacgtggcgacgtggatttcttgttatgtccgcgaacgacgtgtgacgaggacgtggtttccgcaagcctctaccgacgccgcgacaccaggtaggttatgaaaacgcgagcccatatcgccgccatcattgtaatcagcaatgtgttgaggtactgcacgatgaatctgtctagtgacaccagccaaccctctgcttttgcgggcaagcgcgctttcggtgacagggtgtatcgtacgtagccgcgggtcaggcgcgcgttgtagcggtacacgcagaaatctatccacaggccaacgcccggctgtagcttcggatggtggataatagcgcggtgacgtacgccgcggggctttagaatctccacctgtaaggccatctcctccaggtagtgggtctgactgcgacgcagcgtccagttcatgtaaaagtcggtctcgccgtgtccggccacgaagaggctgcttactaaatcgggcgccagagctaggtcaggcgtatcaaattccactgccaggcgacctgattctaacggttccacgatccgggagagcgtttctagatatagagcaaagcgtaccacgtctacctgcggtgtaaaaaactgttgtgggcgttcaccgtcgttgaccacgtaggccacgtagaggccaacattttccaccacgggttctagctgcaggcggcacgtaaagcttagaaacgacggctgtacggtttggttcccgtgaagctgaagcgtcacttccttgccggggctcaccgtgctgtaacgtcgcaccgagtcggtcatctgctccagatcggtagaccagaaaggcgtgcaatgcatactgtcccagtcgcgacacacagcccagcctagctcggtgaagggtcgacgcacacccgaaaaagtgtgcttgaagaccagggggtcgcctcggtagctcagtagccgaacatgcacatagtcgcggctagcgttgacagacggcccgtggagggccagtaggacgagcgtgaacagcaagcgcaacatgctgcgcgggttaggaaatgcggcgtgccggccaccgcccgactcataaacgctaccagcatgacgtctcagatcacacaagtgacgaggagcgtaccgcaaatcactagggaaaaggccagcagagcccgatagtcttgctcttcgcgaacgatctcgtccggttcctcgcagtcttcgtggtccacagaagatgaggagcaggattcttcgttaatctctgccaggatactagtgctataccacaccagagcgctcagcgtgcccagggctaccgcacggtaaaatagggacatgatcaccagcgcagtctaaagtagtggtaattaagtttcttggcgtatttccagagaaaggctttgtaggccgtagggactggccaggcaccgaactcaatattggtagacactacgtcgtaaatgcgttgttcctcatctaagattaaccgaaaaaatagccggttgatgtgacggcgcacggcttgcgcgttaggattgagacacttggtgcccttgtcctttaaaatagccagcacttcctgacgattgcagctttcgctcgctgcgattggcttaagcagttgagttccgactggcagggtattcaacagaatttggttgttgcaacggcagcgcctgtcgtaatcttctagttctaaaacatggacggctaggggacatatggtaagtaacatatatgcgattaatgacaggtatcgtaccgataacagattgatatgcgagtttgaaaccggatggtgcaaccatgttagtaccatattaaacacatactgtaatattttgttttaacgaacttgtctgtttgaaaacatacattaaatattatcctctaacacctatcaaggttatatttattcgtctcggttctggtgatttcgttatgttaacattataccacctattatcgttgcgtttgtctaaccattttgagaagaggtgatcgggcgataaacatactccatgtccaggcggcttccttccgtctggatacaataaatgttcatttttatcgcatccgggccctctgggatcgcgatgaagccaataattacccaatataattttattaggcggccattttctatgaagacatctgcagcgtaattctgttccattcacctcataatgatacacatatgctaaaaaaataatcaacgcaccaaaaattaatcgcattataattttattatctacgtcactaccagtaattcgtaatatccggtattcccggaaaatcactcaaaactgcgtccatgacacatcaattcccgataagtacccccctttgaaatcggatccccccacataccaatcaatcacacaacacacaggtttaaaaatcgatcacacgtcaattaggtttcaaaatcgatactgtttattatcaggaatctagactaattctacaatgacagctctgaatttctctcttgtctttcttgtcaggttctcatcatcagtcatcacttccacccatcgaggagtcatcgtcgctccaaaatcctttggggtcgctagttggaaaagtctctgacacgatccaggcaccccgcacccagtccgactgatctagcttgcggagcatctcaacaggcatgagctgcagggccacggctgtcacggcactgtatcgatgtaacactagggactttctttgcgatgtagccatcaacacggcgtatgccccatagttcgcgtgatacgacgcatgatgggttaaacgttcccatccggcagtgccgtctcgggtccgtgcacacaacagctgcacagcgttatgatgcttaaaattaaccataacgctgggactactgatgaaggagtagtaatgagccaggacgccgtacatcgaaggcaacaagaaagagtgacagcacgatagcaccgggctcttatgtaggcgacagcttatttttcctgacgtcggcaaaaagtacctaaattccccacagatattcagacacggttccgtaaagtgcttctttttttagtgcaggaattggaaaaaataataaaaaatatgaacagctcatctgtaattatctgtgtgacttcatcgtaccgtgatgtaaaaacaacaacaggaagcttacagggtgcggtagaaaaatttgccgattgtgcaacactgttggcatctctcactccgataggcggctataagatagagaattaaaagtatgatacccacaagaaagatgaagagggacaaccaggctagagtatgacgaccgcttttcctttgtttgacggttacatgtgcggtatgattttgctgtcgttgcttgtgatgttggacacctggagtggaaaacgacgtatgattcttagatgcgcatatggtgttattagtggaagtgcagttacgaaccgtgatctgagtgtcgttacattgagtacaattagtacagttgtaaagccctgtgagataagtaccgtttgggcacagtgtacacgttatgccactattctctgtacacacttttgtaactttttgtcctgatccgcatggcgggcaacattgattacccagcttcacctcatcgggcttacacattttacttcccccaagctgtagtaaaaacataccgaagcagatgagcatcaccagaggcttcatgcctcctaccggaagaataaaaataactcatagggccgaacggtgtcatcctctccgcggtttgtaatacgagattgcaaacgtaaataaatgacataacttcactaacacgcatactacaaagtccacctacgacgctgaaagttcttccaggacagaacaggatagtcagccatcttcacagtctacctcttaggccgtatccaggagcataggtaatcagtttccagccacagtacagcgagcccaggaaaccgcacacggtccctgccgggaacacgtaccaccacatcgattcgtcgtgccgtagaaccgtagagttttccgaacttttatacacgccggtggcgttagggccgtgtgtgctgctgtgattggaggttttgtgagctaggtaacagctgtgatttcacctgtcgccaacactgacagcgattacccaggtggagcacaatcacatagctgatggacgttggttgatccgttgattcccatggacattttaacggcgacagtacagctcccgttaaacattagaataatagacgttagtggataacagcatgttattcgcccaagtgtgatcgtggttatacactttcttgttttttgctcatatgctgtaaggtgttcgaggatcgtggggagtatatgtgttgaatcggaatcatgtttactgaccgcgccatacttcgtatacgaacctaaccggcgtaaagtgttttccgatatataaactggcgcctattgtggctgtagcgcccataggtatggcgtatacccacggtgatgttgtgttattcgttttttgtgataaaacgtagcttatgtttaacgtgtgttccgtcacgttatgtgtgtcgttaaaagacggcgcctgtacagtatggctttgagttgtatcttgaattgttattgcatctggaggtgttgtgtacagagtggttgttgcgtgttgaggtgttgttacgttttgaggcacagttgcggtgtacacgggctccaaggtgtagttacggagtctttctatgcaggtagtgttgagatatttttgaatgctggttatgttcgattctgtgaggttaaagtgtgtactatttatgacggtgtaatttagacggtcttgccatcccgaggatattagtgttaggtaattcgtgttgttcacgtttgcttgatatgtataggtaggtgtactgtttgtgaggtcgcaagtgtgattttcttgcagagattttatccatcttgtgtgaaaatattgagatacgcgatgaatgttttcgctatctatattataaagcgtttcagtgtcacctaggggttgtttgttgtaacttttattttggaccctgggtgtgaaccatgattccaatgtttgtatagtaaggtgtcctactaataaagacgaactgattcctaccgtaatgttataccgcacacccagggtgccgtttacaaacacggaaatgtttccgttacaaaccacgttggcagatgaattagattccaggtggtaacgataggataatgaccgttcgctcccaacggatgacacaaagtatccgaataaccaacacgcccattcaatccgcatattttaatcacactattcacacctcacacactgcattttttaacatcttatttttttattttatgcgtgttctcacctcttcatctttttaacaccggggtaactatcgtaagtcggtaggcgtcgatagccctcaccacctcgtcgtccccttcccggcgtggggcaccagcgtccacagcactgcaggtaacacaggtagcataggaaacatacggtgaaaatactccaaaatcccaaaaatgccgcgattccccgagtggcccagggagacatcccggtgtctatgtcggccggcggtgctggcgtcaccggtaaaaatttcggcgggtgtggctgcgaacggtagcagtcgccggggagccggtaacgctgtatcactgtccaacagcggtcgggttcctcgtccggacatgcgggtttccagcaatcctcggcgtcggcgcgtccgatatagaagtagttgcgctgaaaaccgcggtacatcccgcagtcgtgattccgtagacgccagggcgtcggcgaccagatctggtctcccagcgagtagcgacctaacgccggcgtgcagcaaggttcgtcgggccggctgagcgtctccagttgcgtgagaattacgaagcgttgcatgatgaggccgtggctgtagttgcgcagcacgcattcgtacatgccggccgtgtccgtcgatacgttgaaagtcagcgagaatatttggccgagatgcaattgcgagaaattccaagtggcgtacggcaggcggtactggagtccgttcatcagccgatggcctttgacggcgtccaggatgagctcgtcgctgccgtcgtgggaacgacagaaacgtgcgcgaatggagaccatgggccaggagtgtgtcatgaccgtgcaggggatggtaacttgctctccctcggcgaccaacaccggcgccggcgacgtggtctcataattctcggcccacatcttttcggcaatgtcagcggtggcgaaggggaacgaagaggaagaatattcgaggagtcgcgggcagctcaacagcacccagaacagccacggcagagttcggagcgactcccggcggcacatgatgattctttccttccctttttcgcagagacgctgcgcgcctgctcctgctccgtgtgtcggccgctcaaacgtcgggccggcgtggtggtgaccaccgtgcgacgcagcttctcgcccgggatgcccgcgactgagcgtccggtttttttgcaggtcttttttgctgcctcctcctcgccgtcgccgtcgcggccgacgtggtggaccagcaccgcgcaggaactctcgcgtcgccggcggtacgcgacctgtctcattgctacctcggatgtttaagaaggaacgttcatctgcgtcacagggtctgatgaagctgccaagagtcgtggctgtggcgcagcgcgttctgtacggcgcgtttcaccgctttctgcatggccgctaccacgtcgggcgggagcggctccggcggaagctcgatgagcagttgctgcgagtctcggcgctcggcgtccgccgtttcgtcggacgtggcgtagaaaaccgaggtggtcgcccagtcgtccacgctgtcgacggcctctgtcagtgccgggttgtcaaaaccgccatcggacgcgggtgataaaagaacgtacgatgacacgctgttagtacgattctcgtcgtcgctctgggaacgacgtgatggacgacggtagatgacctcgtcttgccacgcgtcgaagcgatcgcagcagcgctggatccaagcgcagcgaagcagcttacggaacacgtcgttgttccaaaagtagagcataaagagaaagaaaagtagcgtaacgatgaagccgaaaacgacgagggtcggcagggcactaccgccgctgccgttttttgtgtcgtgcgggtgcacggtggtagtggcgttagtctgagctggggtcatgacaagtctgaagagatgagagcgtgggtgctcatcagggacagttgaggtctctccctaccgaagccttagcctctacggtgttttatgatcaacgtgtctacgaacgtcattgtgaaagtgacgtctcaggctttccgaaaccgcgtcagattcaacgtgggtttcggtttagcctgcgtcaccgaggcggaggtggaaatgagccgtcctgtgggggagtgtacgaccctgtagtgcccatgggtaacgtcgcgtcggaagaagtgaatgcggcattggtgtacgcgtgggttgttttgctctctgactcggaggagttgccgcagcagctgcagattttacgtactagccaaaagcagcaaaagcagcaggtaaataagagaaggagtccagataatgtccagccgctagcggcaaacagcgcaagttgcgcgactgtccaattactaccaccaaaactctcaacacattgaatcgacgctgaggttggtgttgcagtgctgttgctactagtggatgaagacgaagtagattgactggaattagagctggtacctgtagtggtttcacttgccgatgcggcaagtgcaaataaaactaatatccacagcatgttcgttactatataattgatatacgaacccgtttgtcgtaacaatcagcgttatatacgctgtatcggcatcgttttaccggaaagtttatcgtaatgtaacccgcgttgtgtacattcgtactgaaagggaacccccggtgatgtgcacattatactctttcattctggggtttcccaatgacgtaaaaatttccactatacaataaaattacggaatcatgtgaaaagtgtgctttttattaacagagcagagggtttacagtagatatatgtttgccagggccactgttttctaacaccgatcaccgccaccattaccacccgttgaactccacacccgggagccgcctgatcgccagggactcctcaccgtccatcgtccgaacaagctcccgccaccgatgctgccaccatcaccgagagaaagaaccgcttgctgcagatacgcttgggctcgcctccgtgcggacgccgtttcgtgcagacgctgagtagatcgagcagagaatgtcaaaacgacattaccgcgatccgctcccctcttttttctttttctcattcacgtgtattcttgatgataatgtaccatggctacggtggtgaactgcgtcgcggatcccgtcacgggtttcaacagatcgacgtcggtcagcggcgccgtcaccgccatgtccggcggaggcacgctgtttctctggttagcgacgtggaccgacgacgaagacgatgaacccgcgcggcggtctgttatccgcgacgacgcgtagctgcactgggaagacacttcctcccaacggaccaagatctcatcgggccgttcggagaaacggtatcgtctgtccgactcccgccgtacggcgccgaggcccagcgacgacaggtccgcgaaccggcgctcgtattccccgtacagctcgcaacagcggatcagccagcggtagctcaaaaacatgcgcaccagtttgaaggtgtcgtgccaatggtaagctagatagcagagaatggccacgatcagcacgagcatcacgccgatgatgggtaacccgacgttcagcggcagatcgtccatggtgaccgtcctctgtccggatctacgtcccagtctctctcttttgtacagcactcgcgcgggaacggccccctcaaccctcttacgtagcgggagatacggcgttctcccgcgggccacttacttgcacggtcgcttgaacggcggcttggactgccacatgcaccgcatccatccatttcggcagcagcgcgttcgacgatgtcgtacgagtcgcggatgatgttaccccgccagcacctccgccggcaaccgcgtcgtcgttgctatcgtcgccggtttcgggcgatgacagcgccggcggcgcgggtctcgtctcgtccaccatttccaccgtgtcgaagcgacagccgctgccgtagtacatagctccgttcaacggccggcgggccgggtcgccgagttccgggtcgggcacatccatggctcgccgtctccttctttgccgctcgtggtgccgacggcacttctcgggataatgacagccgcaaaatagatcgtggagcatgtctcgccaactgtcctggtgataatatcttaagtacgcgatgagcgcgccgatggccataatcataagcgtaagcaaaacggcacagataacgtgaaacaccgcggtcatccaagtcgggcggcgtcggggacgcggtgggtcggtttctcttacgccggcgtcactcagccaccacacccgtagccgacattcccagaatcggtgaatgcgactcaaggcctttcgacgccgccatttatttccaacgtccaagtcccacgtcatttctggcatctccacgcccttgactgacatactctctttctctctcttagctgcggtgaaaaagagggaaggcgtgtgctgctatacaactgtacaacggacgcgctcgctctttcggtctcaggtcatctgcatcgactcggcgtccttcatgacgctctgcaccgccttttccaacagttcctcgatgtccgaccatcgaggaggcggggctaactcggaaaccgacacgataggcagcgtggtcggctccgttggtgtgcggggtcggggacagggacacgagagtcccaccttcgagagattctccagcccgacggtgcgcggcagtctcggattccgcggcggcttttgcggcgtcggcgttttcgggaagggcctgggcgtcaccggcggtgtccagccgaccggcttgggtttcgtgggcggcggtgttttcttggtgagcggcgtgctcaggttcttacgcggcgcgggtatcggcgtcgggggcctgtgcgacgacagccgcgtggtgggggcccggaccggcggcgtaggcggccgcttcttgcgcccgggcggcggaggtggcttccaggatggtggcggctgatgcagcaccgtgtcgacgctggtcgaggacgacaaagagctcgacgaggaacaatgcgacggagatcggccgatgctggttggcgttcccggagtggatacgtcggggatctcgaaccgcgccggaggaaactcgggtttatctatcggcagaccatcctctcctatgtagagcgacgtacaccgcggcacctgcggcgtcggcgggtgggtggccacccgcatgagccccagttccagatccagcggctcgacgacgtcttctttcggattgcgatagcagcacgcgcaggcaccacgcttatcagaagcagcacccgggagccggcctcgcgacgaagtctcgtcggatcgcttgcggcctcggcgctgggtaaataaggaaatggccaggaccagggaagccagtccggtaccgccgaggagcccgacgccgagccacagccacaccatgatcttctctcctgcttggaatctcaaactccgtgtcgggaagggccggtgtacggacatttatgccttggatttctggaaacgtcattttttggcaaggaatgtgtttattgtccaaacactgaggaaggagatgtgggccaagtcggaaaattccttatcacaccgggggcgggttacgttccggtctgatgctgctgctgttgttgtagagccgcggccacggccgtctgcacggcagcttgtaccgcctcggccacgccgggtggcatctgcggcatggcggggggaggcgcgtcgggcggaccgccgggcatcgccgtcggctgtgacggtggttgtgaactcaccgtcggctcgcacggaggtttgttcttcggtctacccctcggtttgtctttcgccctacctttcttcggtttgggttccgatgtcggtgttggcggctgcggtgggatgacgggctggtgggactcctccgacggcggggggacgaacaccgtcggcgccgaaaccgggggactctcgactatctcgcagatcaccctgtcaggatcgtcgccgtgcccgggacgccgtcgatgaccgtattggaccatgtcgtaaatcatcgtctccttgtaacacgctgaacagcagcggctgcaggggcccgagatgcatttacagctgcacttacagctgcagctgcagtagcgcacccatcggcaagttaaaatgtcgattatggaatctttgaaaaattcccggtagcggatgaggtacgcgcagaggaaaatcatgaaaacggaacagacgaccacagccgcgatgccaggtccagaaaaaatattcgctgatgaacccgccaaacaccaaattcccaaggccgcgcatatcatccagatcacaatgatcgcggggacgccccattggcattggcacgaaggatcttgcacatcgcaacccatcgctactgcgttctcccacaaacgccatcgcactatttatccctacagcggctgccgagtcacgtccgccggcgcccatcggccgcggcgatctcctagtaacactcgtccgacacttccaccatctccagctcggccggcggttcggcatcctccaccagcggcgtcgtctcatctttgccgcagcagcggacgcacaccttctccaggcagaacgccaccagctgccgccgaacgtaccacaggtacacgtgcagacctgcgaacaggactacggaggtcatgaccaccacgacgcacacgggaatccaaggatcgagattgtcgctggaactcatggctatcgccaccgacgtgcccgcgtctgtctcaccgccgctcgcccgatgtcgcacggcttgttatacgctagcccgtcgccgcctcggggcacggtgccctcctacccacgtaacttcctccgtgacttaaagtcgcgtgtggtagatctcctgctccgtggacgaaccgttcggcaggatagcggttaaggattcggtgctaaggccgtgtcgccaacgtcgaatgctacgttgcaatagcttcgacggacggccatcctccctctcatcgcaataataaaacaccagcagcgcacacgacgcgatcacggtgacccccatgactagacccacgcagatagccagccccgctagcgtatccagcgccatcccgttcgctcccgtcgtcgtctcctgaacaaagcaactccgcagtccccgttttcaaccgttttcaaccgtttttgtttccttctccgcgactagatgttaacgcccgcggtctttccggccgtgctctacctcctggcgcttgtcgtctgggttgagatgttctgcctcgtcgccgtagccgtcgtcgagcgcgagatcgcctgggcgctgctgctgcggatgctggtcgttggcttgatggtggaagtcggcgccgccgccgcttggaccttcgtgcgttgcctcgcctaccagcgctcctttcccgtgcttacagccttcccctgaaacccgcgtcaatcgactgtcccgaaaacgccggcgttaacacaggaaaaaaaaaccacgcaggaaccgcgtaggaaccacgcggaacatgggacactatctggaaatcctgttgaacgtcatcgtcttcactctgctgctcggcgtcatggtcagcatcgccgcctggtacttcacgtgaaccaccgtcgtcccggtttaaaaaccatcatcgacggccgttataaagccacccggacacgtgccgcggcacttgcctacggcgctgctccagggaaactcctcttccttctgctcttcctccttcaccgcagggaccgtctccctcgaccagggacccgccgaagcaaccgccggaacaacctggaggaggcgcggcatgacggcacccaagtgtgttacgaccactacttatctggtcaagaccaaggaacagccctggtggcccgacaacgccatcaggagatggtggatcagcgttgccatcgtcatcttcatcggagtctgtctggtggccctgatgtactttacgcagcagcaggcacgcaacgggagcggcagcggctagataagtctctggcggctacagctccaagcgccgtagccggcccgcctgccgatcgcgacgtcgtggaccatcgaacagagactcacgcgtacgagaccccgaggtacgccacgcggtgcctaacgcggtataccacacccgtacggtctgcagtgcggcgtacaacgtgtggaaaacgcgttgcgtcgcagagtcagccacgtccccgtcttgtcgctccccaatcggctcccgcacaccccccgcggcacccagagggcgggtgagccaagtattcttaaggccgttctctgttccatatcccataaattgtttattccggagctcgttggcgcggaaatagccggataaggggagcaacaaccgtcggcgaaagccgtcccgctcattcagtccgggtttcgcgtctagtcggaggtgtgaccgttggccaacggaacggcgtttcacgatcaaaatcgtatcgggtagtgtaggagacgtcggcggtgcagaatgcgactcgcggcgtagctcgccgtcgctatgcggctcgtcgccgtgtggcgcggcctggccggctgtctgcgcccagatctgttggccttttgggtcctctggctgctgctgcgtgtgtgctttggcagacgcggtggcaatttgcggtctgcggtaagtgaggatatcgccgagcaagcgcatttgcggcacgtgggcggcacgcgtgttattgttcgttcgttgccagatagcaagtgctgtcgacagcagacgttgtgggcggttggtgtatttttgcgggttgcggtgaaagtcggcagccggcgtcttgtgaagtatcttaaccatctgtgttgctttttgcagcgtccagaaaagcgacgcgactttggggatggcctcgtgctcaccttcgcggagagcgccgccggacctgctcgtcagcagcgagctacgcagacggaatatctggaggagagttacgtgtgtcacaggggagcgcgggtctccggcggtaacgacggcggtatcgtcgacacgtgtgcggcctgctgtgctctgcggaaaagcgccggtctcggagaccgtggacgaaaaagagaacgcagcagctaccgctggcggcggcgtcgttaatgctgccgttgatgatcgacgttgtgagtactcggaaacagcggtgaggcagaagctcggttctccagggaacgaccgtcgatgcgtggtaggcgcagcaggtgaggttggggcggacaacgtgttgcggatcgtggcgagaacgtcgtcctccccttcttcaccgccccacccaccctcggttggtgtttctttttccttgtgttctgcagatagttccacggacagcgacggcaagtccataagcaccggtgtgcaagtggtggagcacgacgaagatatcaccgcgccgcagagtttgtggtgcacggcgttcaaggaagccctgtgggatgtggccctgctggaagtgccgcgttgggtgtggcagggctggaagaggtggcgcaacagcgagtccgggcgtcgatggagtgctgggtctgcgtcggcttccagcttgtctgacttggcgggcgaggccgtgggagaattggtgggctcgctcgtcgcgtacgtcatcctcgaacggctgtggttggcggcccgaggctgggtgtgcgaaacgggtgtgcaagccgaggaggccatggcgcgacggcgacagcgcatgctgtggcggatgttctctcgtggaggcgacggcgaatgcagcacacggtgtgcgatggagatggcgtgcgaggaagaaagcgccgtgttgtgagccgacggcgcgggacgcgggccggcgcagcgcgtgggccacgtgtggtggcaggcggcgtcgtccgcttgcggccgtcgccgcgccgcacagacgcaaacacatgtcgccgtcaagagaaacagtctgagcatagccgtctgcagcggtccgcgtgtagaagcggggggagaacgacgttaataaagaatagcggcggtgccgatagggcgaccgctgaagcgagctgcgtgtgcgtgcctgttttgttccccgtcgccgccgaaaagctacgcgcggcccccgtccctagccttgagcgcgccacagcacgccgcaaactcggcgtcgcgcttacgtcccgcaaacccccctcagcctcgtcccgccaaccaataccgtggcacgcagtgccatagcgccgcgcgtcaaggcgcttacacccccctcagcccggtcccgcaccggcgtcggtctgggtgtggcgggggtgcggctgggtgggtgtgtgccgggtgcggctgggtgtggcgggtgtgtcgcgggtgtgtcggctggctgtgtggcgggcgcgtgccgggtgtgtcgcgggcgtgtgccgggtgtgtcgcgggtgtgtcaggggtgtgtcggcggggtgtgcgcgcggccagatggaagcagtgtgccccggggcccgcgatccccccccccgccccggcgcgggcgcttcttctgcgtgtgtcctcgacgcgggtctgtgcgcctgcctgccggtcccggcagactgggctgcggcttcctcgttttttttttccgcctgtggccgtccccggggacttcctcttttccgcgtccgatcttcgcgtccccagggagtcgcgccgccgtcccctcgggaccgcttcctcttttccccggggactcaaagacacgcaagacagacgcgcgactgaaagagacgcaagacacacgcgcgtctgggtttcgccgtgcgcgccgcacggcgcttttattcgccgtcgccgtcccccgccaccgccaacttcccaaattcccacatttcacccccccgatgaaaacacccccccgcccctcggggacccagcacacggcccggaatggaggtcaggcgtccacctaggtgtgcgcgcgctcggcggcccgttgttggtggcttgtcgcgcatcttctttcggttttttcacggccttccagactgcgcggcggcaaggcggcgccagcaagcgccgtgcacgtcgctgcctataaaagccaggtgcgtgtcgcccgcggcacacgggcgacggaggcgtccgcgtgtgtaaacggcgtggtcgctgacgcgggtttgcttcctatatatacagagtggacgtcggaggcgtccggcggccatggcccagcgcaacggcatgtcgccgcgccccccgcccctcggtcgcggccgcggagccggagggccttcgggggttggttcctctcgttcttcttctttggaagcgacgtcaacagcggggactagtacgagtactgcgggtacggcgacgccggcccacgccgtccaccgggtagaaccccgcgggccgccgggcgcccctccgggtagcggcaacaacagcaccttttggcacggcccggagcgcttgctgctgtctcagattccggtggagcgccaggcgctgacggagctggaataccaggccatgggcgccgtgtggcgcgccgcgtttttggccaacagcacgggccgcgccatgcgcaagtggtcgcagcgcgacgcgggcacgctgctgccgctcggacggccgtacggattctacgcgcgagtgacgccgcgcagccagatgaacggcgtgggcgccacggacctgcgtcagctgtcgccgcgggacgcgtggatcgtgctggtggcgaccgtggtgcacgaggtggaccccgcggccgacccgacggtgggcgacaaggccggccatcccgagggtctgtgcgcgcaggacggactgtacctggcgctgggcgccgggttccgcgtgttcgtgtacgacctggcgaacaacacgctgatcctggcggcgcgcgacgcggacgagtggtttcggcacggcgcgggcgaggtggtgcgcctgtaccgctgcaaccggctgggcgtgggcaccccgcgcgcgacgctgctgcctcagccggcgcttcgccagacgttgctgcgcgccgaggaggcgacggcgctcggacgggagctgcgccggcggtgggccggcacgacggtggcgctgcagacgccgggcaggcgactgcagccgatggtgctgctgggcgcgtggcaggagctggcgcagtacgagccgttcgcgtcggcgccgcaccccgcgtcgctgctgacggccgtgcgtcggcacctgaaccagcgtctgtgctgcggctggctggcgctgggcgcggtgctgccgtcgcggtggctgcgctgcgcggcagggccggcgacagggacgacggcggggacgacgacgacgatgacggcggggacgacggcgatggcgacggggacgacgttgctgccgggggcgagcggcacggagacggaggccgccggcggggacgcgccgtgcgcgatggcgggagccgtggggtctgctgtgactttacctccgcagccgtacggcgccgccggcgggagcgcgatttgcgtgccaaacgcggacgcgcacgcggtggtcggaacggatgcggcagcggcagcagcggcggcgccgacggtgatggtgggtccgacggcgatggcgggtccggcggcgtcggggaccgtgccgcgcgccatgctggtggtggtgctggacgagctgggcgccgtgttcgggtactgcccgctggacgggcacgtgtacccgctggcggcggagctgtcgcactttctgcgcgcgggcgtgttgggcgcgctggcgctggggcgcgagtcggcgcccgccgccgaggccgcgcggcggctgctgcccgagctggaccgcgagcagtgggagcggccgcgctgggacgcgctgcacctgcacccgcgcgccgcgctgtgggcgcgcgagccgcacgggcagtgggagttcatgtttcgcgaacaacgcggtgaccccataaatgatcccgtcgcatttcgtctttcggacgctcgaactctcggtctcgacctcaccaccgtcatgacagagcgtcaaagtcaattgcccgaaaagtatatcggtttctatcagattaggaaacctccttggctcatggaacaacctccacccccatctcgccaaaccaaaccggacgctgcaactctgcccccaccgctcagtgctcaggcaagcgtcagccacgcactccgatacgatgacgagttgtggcgcccgctcagtacagttcacgaccacaaagcctggttggatctcgacgaatcacactgggtcctcggagacagccgacccgacgatataaggcaacgcagactgctgaaggccactcaacgacgaggcgccgaaatcgacagacccatgcctgtcgtgcccgaagaatgttacgaccaacggttcactaccgaaggccaccaggtcatcccgttgtgcgcgtccgaacccgaggatgacgacgaagatcctacctacgacgaattgccgtcgcgcccaccccagaaacataagccgccagacaaacctccgcgcttatgcaaaactggccccggcccacctccgctgccgccaaagcaacggcacggttccaccgacggaaaagtttctgcgccccgacagtcggagcatcataaaagacagacccgaccgccaaggccgccaccgcccaaattcggggatagaaccgcggcccatctctcgcaaaatatgcgagacatgtacctcgatatgtgtacatcttcggcccacaggccacggccgccagcacctccgcggccgaaaaaatgtcaaacacacgcccctcaccacgttcatcattgaaagtctctccagtccatatgttgtcaggacgtgctgtcgttctccgcttgctgcgaagcccgttcttccgagtcgtgtcgctgcgtccagcgtcgcgcccaagatgggaatttgggtctcttcacgcgtagcctcctccaccacggctgctgatcgccgtcactaaggaccgacacggaggatgacgaggagcttctccccgactccgcggtccgcgaccggctacgtagcgcgtgtccctgccagtctccgcagttacaccacacgtcgtgagcagcgtgcacctgctgccgccactgggcctcggcgtgctcgggccacccgccggagcccggtctgagctccgacgcaggatgcgcgtactcaacgtgcgccttccagtccatacagcaacaccataggtcgtgcgagtcgtcggctacccgccgccaggccagttcccgcatgggaaggctggacacgccgaccgagaggtcaccgagcccggacgccatctcttcttcctctccgtcgctgtcattaagcagccaggtcacctcctccgctccgcggtccgccggtctcgacggaccgcgccgccgtcggcaacacggaaaacagtacgccagcccgagccgctaaggccgcatgcccctgccgcccaactgaacacgcatatcccgctcaactgcgttttgccacccctgccagtgctcccgctcgagcaccaccccgcatctcccaacctttttccaataaacgaaaccgacatgacacacgtaatgggtactcgtggctagatttattgaaataaaccgcgatcccgggcgtctcagcacacgaaaaaccgcatccacatcatagacaagttacagtccacagtcacatacacgataaacaataccaacagggtaatgtttatggagtaaaacactattgtccaggccacatgcgtgtatgacttccgcaccatcccgtactgcatgttccacatgtacgcgctagacgtgtaatccactcgcagttcggggacgcaacgcagccagatcacatccccttgcagtaccagacgcagggctagcgtctcgaagatcggcatcacatctaagttccgcacgttccactttaacgactccccgggaacgaactccacgtcgtcggcgtgtacgtacaggttctctcccacgccgccataatcggccttcggatcgaagacgaaccgactcatgttgcccacgatgctcccccgagcaaacaacttgccgttgtcaatgtagcaccggttgtcctcgatttgaaaccagggatgcttggccgtggacttccagggccggagcgcgtcttccccggctttagtgattccatcgggcaggcggatcaagggacccatggaggtccaaagacccacccaggctttccagagattgttcatggtgaaacagcgtgtggactgtacgctctttcccaatttatatcccagagtagtgacgtgagcccagccacctcccagattcctgacgttttggttgtctttcctgccaattcctcccgtaaacttatgattatcctagcccattcccgataaaaatacacggagacagtagatagagttacgaataaaccggtttatttattcaagtgtctcaggagattattgaacgagcgtggataccacgccgtcgtcagttcatggtggcattgagcagccatagcaccagagtcccggcgcccggtatcagacacgctgacctaccgggcgccttcgagtccgtaccccgcggcctgggtgttagagtccgtaccttgcagcccaggtaggtttcaggtaccagctggttcgtacctgttaaataaatcgcagacgggcgctcacccctacggtcaggagcacaagaacaaccagagagaacagatatacgagcagggttctgaacagcagaccccaattgtcgtctctcatgcttcgctgaaggtaccagttgatggtctgagagctatagtccatcctcacctgaggaacacacgcggcatatttcttggggtctccccacctcgtagacaacgtgatgtccaccatatccacggtgtgcgtcaccgggtgcccaccgatgttccactcgaaataggctccgcgctcatcatggtggtactgctcaccggacacctgcagtctgtccatgtaagattgagagacgatacccacgttcacaaagtgtttctcggtgaagttgcccgacatcctccccttgaagtacagcatgcccatatggaaccagcattggttctcctccactcgaaagtgggccgatctgatctccgataccaccacatccaggggccggggcaccgagtccgcgagtctcaggaacaagacggccaggatcgcgagcaccaacaccggcttcatggctccgaaggtccgctgctcggctccgctcaccgctccggtctggctgcagcagtgcttcgctgagaagcagcgtgtggactgaacggtgtttttgaatatatagcgtttcttggtgacgttgtttcccctacgtagtaggcaactacgtgccaaaagaggcgttacggtactttccgtactgggatttccaaaccgggactttccacacggcggtttcaacaccgggacttttcacacggtgatttcggcaccgggactttccgcacggcggtttcgccaccgctgacgttctcatcgccgcccacgtcaacggtggcgacaccgtactttcccatgcggtttataaacgtcaagagtcacgtcagtcgcccacccccattacacggcgatatcccgatagggcatgaggggacccgggtgtcgcgacatgtcgacgacaggtgcggattagtggtcgtgtcgcgacatggacgtgcagggggatgtctgtcgcgatagagttgatgtgacagcccgctacacctctctgtcgcgacatgcatacacaacgggccggcttgtcggcgattgtcgcgacatatcgttatcagttagcgaccggagttgtctatcgcgacatatcgtcgactatcgcgacagaaaaaataccgttcgtagagaatgccgtgttgaaggaacgcgcttttattgagacgataaaacagcatcaggagccacaacgtcgaatcccacgtccagtcgattcgtatgttatgctgcacagcaatgctagaataacaaccagcagggtaatcccgcaacataaatacaaagtcacagcgaagaatccgtgtcgttctatcaagcgaaacgcgttccaaacggccccgtcacagacgcagttattcataagcgttaacaaccggtggctaggatgaatatccaaatcacagggcagtagccgacggactcgttgacaggtcagcctaccctcaaggttcctatcgttcggacgggatttgtgcgttttaggcctctttttcgccgcctgcaagcattggtgcgcaaagtcctcacccagctgtttccagctatcatctgcatctgtgcagtcccctgtatcgttgtaacaaacgggtctgtgcgacttcgttctcggaacacaagcttgttgtcgcggagacagagagagaagggttttcgggtcacgcgaagaccgctcaccgggggtcggcaacgcacacatcaacagaaaaccgagacgaatcaagagatccatagtgaaggagtgatatcgacgtgcttacgaaacggcgattatatatgttctcaacaataccgccctacgttgtatgatgtaacgtgtgacgtgagtctgatccaacactgaacgctttcgtcgtgtttttcatgcagcttttacagaccatgacaagcctgacgagagcgttcatcggggcatgaagtacgcattacacaaactccatatatttgttacgatagaatacggaacggaggaggctttcgccacacctatcctgaaagcgttgcattctttatgataggtgtgacgatgtctttaccattcccacggctgctttgcgtgatgatgacattcatcatgtatttccattcacacataccttttgtgcatacggtttatatatgaccatccacgcttataacgaacctaacagtttattagcccttgacaggataggtcaaaagattatatgtaggttttccggtaaaccgaattgtgatatttctctgcaggaaatagaacagcctggtacctataaaacggacaatgcagtactgtagcagcgtaaccaagtaggtccacatgaacacgtacaaaattatggtaagccatcgtttttcataccacagcctgtagctgtcgtacatgaatgaggacggtcgaggaacccagggtagttgtaattgggggcgacattcgtactgtccagaagacaattgcacgggtttcagtgagatgagtactttagcgatgtcggcgggggcgctacgtttcaccgtgacggtgagaacttgaccgtcgttttgtatttcatgaggcacgttatacaagccactggtatcatgaaggatgacctctgatgcgatgtgaggattaaattgtccctcaaaccgccaaacgctggtcatgtttccaccgtcaattacgcagctgacggtgtgagataccacgatgttggacttaggtttgggggctaattgcctttttacaaattcccttctgtattgcaggtcctgctgccactgcttttccgtgcggaaagtcgccatgtcttccacacgtgtggcgacgatagacgccaccaaggtagctaccagaagcagctggatccgcatggcattaccgtatgtcaattagaaagttgagcggacacggttatcgttcctggcggatataagtatataaacgcgagttagcctttcccgtccgttttgtacacccgttccccacacaaatgacgaatacgacctttttttttataaaaataaaccacgtgtattatataaaaacatttacatagaaaagagacacactctagattaattaagggccggccgcatcagcttgatatcgaattcctgcagatctgctagataacttcgtataatgtatgctatacgaagttatggatcaacataaggacttttcacacttttggggtacacaggcgtgccaccgcagataataagcgctggatacacggtacacagtcctggccagcacgtatcccaacagcagcaccatcgccatctgtatggcgatcacgaccccgagctctaagtgtctgtattcatagtgtagtcgtcgcaggttatccactgaattcccgtagctgaaataacgtatatggtaccgaggctggcaccacatgggtttgcatttggagcacggcaccaaatgcagagtgagatggtccaagtccgtgggcacccactggcgcaaacggaatacggcttcggtggtctccacgaggcactccggggcttgcagacggccccactttcgtccgtgacggcccgaccagccgacccgagccactatccctttctcgggatagaacgtaccctgtacacgccatacagcgtccaacacgccgtctttgacgacgcagctggcctgatagctggacacgttgttaagcggcggaaagcgaaactgacgtgccggcggagccacatagttcggttcaccgtgttgtcgcggttcgtcctccctatagtaatagtagtcgtcgtcctcataggggttgccggcgtgagccagcgttacccaacagcagcccaggccgacgaggaggcgcagccaccgcctcatggcggcttcgccagtcaatcgtctttagcctcttcttcccgtgaggtccttccggtggcgcggtgccgacctcggacccagggacgtatccacctcaggtacacacagtaggctacctggacaccgaagctgaacaaggctacatgtttcacaaactgcaccagtaccacatagaggaatgtcaggtagcgtctctccgcaaacagccgttccaagtctgagggcgttacccgcagcggcaaccagggcagcctggacgccggccggcaatggagcacgctccggttacaggcactgcaggggtaaacggttaacatcacgtaagagagtcgagcgtccacctgtgggagctcagtttcgtaacgtagagccccgtcattttccagctggggtgcgccgaccttgaaatgggtcgcgctccgttcgttaccccaggtgccgtaggctctcggggccgtatcggagaagttgccgtgcacaagccaggcggccacgagtaccccgtgctggacgtaacattcggacacggaactggagacacggtagccggacacgtccccaaacccgcgagggtactggggcagacggacggacttgctatttgacaacggacagatacgagacgacgaggacgcagacgactcgtcgctggaccacgacaaccggagcgactccttggagcggctcgagagtacacttactgcgatcagacaccagtgccagaagaaggaacaggtggacggggaccacaggatcatagccgccggcaccgcggccggccgcaggaagccgcccggcgcgtcgtctgtgtgcgggagccgaaacaccgtgcctctttatatcgtcccgacgtgacgcgagtattacgtgtcaggggaaaaccccgtcatgacgaacgtgattcgtaagtgacgcggggtgctgacggggttcggctcgagaagtgacggagcgcctcacgtcagtatgatgtccgatccgcgtcagccccgacgtggttatggtcaccgaaacccacgtttatatggacgttgagaacagcgcctgaccacatgattcatcataccatttctcggaatcgggcccatgccgggaaagcacattccttttcagtaaacaacaatgacatcataacaaatcattttattcgcgaggtggataataaccgcatatcaggaggagggatcgggtgatgacgcaggccccgcaaaacagtccgaaataaatttttagtatcgccccgtagtcgcctagataccagaggtacgtcaagttcatcaaaacgcccatcggcgtcccggaatcgtataccgggcacacgaagcgttcataacaatcccgggaggcgagtgttagggtagcagaatagtttcggggtcggtttccttccggcgacgacagctccgtgggcagcagaatgtagagcgcctcggtagccgtcgcggtgccttccacgaggatgggctgccggtgcctttcgtgattttctccgtcgtgtagccaagccgaggcccgcaaagtcttaggcgaggggaattgtccatagactttcaccgcacccttcagtacatggttctgaataacacagccgcacgtgaagtaggtcggttctctcgtctcctccgtggctgccgccaccactcccagccaccacaacaggcaggtcgcgagagggttccggaggcttccccggcgtagcatggtttcgggttaaagcaaaaagtctggtgagtcgtttccgagcgactcgagatgcactccgcttcagtctatatatcaccactggtccgaaaacatccagggaaaatgtcggtgcagccaacctttcacatacagcccccaaaacacttgaatcactgccaccatcatcagcgtatactgcgccgacttaatcgtgagcgcgtagtacgccattagacggcgatcttcgaacaatagtcgttcgatgtcctctaacgagctccacagaggaacccaaggcacgaggcaccggggttcgcactctacataataagtttggcattggtggcagggggaaaagtagaacaacacgagttttgtgcgttggggaacacgatagtcccggagccagtagcgttttgcgacgaggctttcggagacgtcctccaccggcgtcggcactcgatccgcgtagccctccagcgtctggtagtacacccggggtgtcggcgtgggcacggacaggttcccgcgcagggtccacagagcctccagtcgaccgcccgatcggagcacgcagcgcgcctcggaatactctactcggtactccgaaacatcgggcagaggcggtaacggctccgtctccaccaagggcggaggttcatcgaaaagagtcaaggataattcaggcatactacctgcgaccggggcccagagggctaggataagcattacaagattcattctgtcttacaagggaaggctgttcccctgtctagactcaaaagctgtaaggctgtcttatagcatgtagtcttgcacgtcacggggaacagggtggtgatctagtgacgtcgggagaacacggtgttttagggtgcgggggacaaaggacagtacgacagattaggtgatagaaacgtttttttttatttatgaaaaagccagtgtgccgtgcggcctagggccccggcgtagtttggataccagatgggggccgtcaggggtactaccacgagcagaaacataataacttggtccatgtatagcagcatagcggtgcgtagcaggtcgccgtccgtgtagcaatttgacggtgagcgataaagcaccgttaatgtgtcgcggataagcacgatcttgaggccgtagatgaagctcacagtcagtgctaaaatgatgcgttggtatggttcccaggactgcacggcgatgaagagccagagtatgggaagcatgaagcttagcaaacagaggatggctaaccgtcgttgcatgttccaggccatgagccaggctaggcccgtacaccagacgcagagcatggatgacaggacataggcctggattaccacggtgcgatcgaaacacagcccgatggtggacacggatatcgtagtgagggtggtatataccatgaccagcatcagggtcccgggtaggcgccgacgttccagccagtacgcgtggcaacgcagagcgcagggtagcagtgtgctccagaagggcagtgtatcgcgcaggtagggggtcgtcacgcgccacggtatgagcatgaaaaggatggtagtggctatggtggcgctggtctggaacacgacggtgccgtagagacgtaccatccagagaaagtgttgaacgctccgcagggtgtcttcatctttggtgattacggtgactcgacggatcggcggtggtgacggcggcgacacgggtgggggtttctctttcttatggccgagtggctcgccttggtgaaactggatctgtaccatgacgggtgctcgacgaacagtcgtcggggctttaggtacccggcaagttttatagagaaagggggacgatgggtggtggctacgagccaccgccaccttcgcaatacgaggatctgaaggcggcaaagacggtcgtccagggcaggtgccagaggttgggactgagcacgatcagcgtgattttaaacatggtcaccagtcctacgtagatcagcagcgagccacgtaacgtctgagcagccggcagttcgtcgcggatgtaacgcgtgccgtagaaagtcacggtcatcataaggaagacgatggcgccgtagccgtagagtagaatacgctgatgatggaacacggtctggtcgccgataacccagagcgtgatgaaaaaaacgctggtgagcacccgtgtgcatatgagctcccaacgcttagcgcgaaagctgtccccaaccatgacagcgccggtgcaagctatccacagcgtgaggaccagtgtgtagtcgatgaggatggcgggcaggtcggagcaccaggtgtagaaaaccgtggtaacggagaggaggcctacgtagcccatggtcaataccacgtcgtcggggtgcctttcgccctgtatcaagaccaaacaccagagaagggagggggcaaaaaccagcagcagaggggaagattcatgttgacatatgttgtgggaatcggggatgcccagccaaatcattccgcagaaagccgtactgatggcgatgtgaaagaccactagggcgtagacccggacgaggacagcaaaacggcgcagccacataaggccgtggtgcagctgcaggagagaagcccattgcggcgaatgtagcgacggcagcggcgggtccatgaggcgggtgatgcacccgagtgaacgggtgagcgtctcggtggagtcttcttataaaccagcggagctcaggcagtcttgctctggagcgtcgcagtggtggtgttgaggatgacgctgagcgtgccgttgtcaatccggtaatgatgataggtgccaagcttggccaggtagctgaacatttggtcccagcgtgccgaccacaccacgggcgtgagcatcaggagtgtggtgtgataaatgagtgtttcggtggcgtaaagtatcagcgagctgcggatgatgtggctcacgggcattttggtggcgatgtagcgcacgtcttggaaaagaacggccaggatgcagcccacgaacacggtatagagacacagcagagtcttatgcaaccaggtgtaagtagaagccaggacgctgaccatcaccgtcaaaagtgtggaggtaaaaagcgcgtcacgccacacggagctgagacggtgctcccaagccacgccgttgcaggccacgaacaacgtccacgttaagatgaggctggaaacgccaatgggcgctgtggcgcacaggttgagcccggcggtggtgaacgacagaagcgccacatacagcgcaaacaccaggccgttgctggggtgtctatgatcggtaagctccagcgcgcccagaaccaacaccggtgtgcagctaagcaataacggcgaaggatcgtcgcggcactcgtagcccagcgaggggtaacccagccaaaccagcgcgctaatgagcacgctaaaagcggtttccagcgtcagcaatccgtagacacgcatgacgatcgcggtccgccgtagccaacacaccgcatcttcggaagctgtggacgctgtttccgaataccgggaggagatcgtgcttccctcttccaaggatcggaaagtagcgtccgtcgtttccgcagacgcggcttccctggtacgctccgtttccgacgacgcggtttcccgctgcgtggaaactgtctccatgtcgggaccgcagcgcccggcggcgtatccgcaaggtctcgaagctacagcttgtcagaggaaaagtaggtttgcaaaaaggtgcgcagggtcatgattctcagcaccatcagcagagtgaaaaccaggctgagaaacaccttgacggccgccaaaagcgcgcgttccagcggcgtctcgtagcgtacagccagggccgcttcgtggaaatgcgagacggctagacaggtaatgagcacgctgaaggacaagacgatcttaaagcaccaggaccaaccacgcctcaagatgaccaccacgattgccgtgaaggtcaacgtgatcaaagcatggatgaccacgatctgacggcggacggtacgttcgggagccaacaacgctacgccggtgcagctgagaaaggccagtaaggtgaacaacgcggccgagatgaccaacgtaccgtccaggcagagacatatcacgatcaacggcggcacgtgaagcagcgtgtaaaagagcagaacgccgatattgctgggatgcgatgtttcgtaacagtgaatgaagatcaccgacgtgacgggtatgataaagacgaggctgggcgaggactccgtgagacacagacgggaatggtgaaaccacgtcgcgggcgccgcgtagcagaaggcgctcaacaacgcggtcaagccggccagctgccaacccacggcgccataggtgtgcagcgccacgcggcaacagtcgacccaagccagactgcgggtcgccagccgggtctcttggatcccggggggcacgtagatgaccgtgccatcggtgggtacctgaaaccctttttctcttctcatggtgcgctgcgttctctggaaacggctgctctgtccgaaaaccagttccgaacgaaaatctagggcgagagggtggacaacggcgtcgacgacgaagcatgggacaggtcgttcggcgttaacgtcatcgcgtcggacgacggtagttctaagagacgtagatcgctcagcaggtcctgacagttgcggattcgcaagatcagaaaaaaaagggaaatgaacgtaataaagagctgtagcgacgtatgcgctacatcgcgtggcataagaacgtgacggacgaaaaggacctgctgcgaaaagtggccggcaaagataaggcccaccgtgctgtagaagcccaaaagcagccgcaggggccaagtccagggccgcgtaaagacgatgagaacgttaaccagaaagaccacgacccagacgccgttgatgagggtaaattgatcggacagggtgcagttgtcgcgacagatgaagactacttccgcgcagagcaaggtgatgaccaatgtgagcacaaacgacgtcaacacctcgcggggctcctggcaggcacacgtgacacctagcgccgggatgtgcgccaggaggccggcgagtaatagcaccagctgtcggaacggacgacggcagcgcgggtgccggtttcgctgagcgagaaccggtcgctcataacggaaatacacgaagagcgcggaggccacaggcaccaggaggagcacctcgggcgcccagacgacgtgacaaggaaagcctggacgcgacttaagagtcgctgtagggaagaccagagagaagctacccaagacggccaccgccgcggagatttggaagaggagcaagccggcgattcggacgacaacctcgaagcgatgcacccagcccagcacggccaccacggccgcttcatcatagtcgtcgttgttgccgctgtcgaacagccgccgaaacacgatctgtcgctgggtcgcggtgggaaagcgcagacccatgacagccggaggctatatgaccgcgcgtctaaggcgcgagatccgtggggggacttttagatgtttgggcggcccgcggttctaacaggcttgattggtggagacggccggcgcggcgggtgggggaaacgacgagtttttccgttacgccatggttcgcgtgaggtttctctgtacctcccgcaaaaggtcacagcccgaaatggaggccgcgttggtggccccggtggcgcgtgacgataaccaggtcatccaagtgatgagtttgtctaatgagtcctcggtggtgaagaggataagaatgagcaggtacaagtacaccaggttctcatagagacacaaggtgagcaggtcggcctcggaccacgcgatctcaaacaggcgtgtggtgtcaaagaccgtaacgaccagcatgaagctgagcgccatggcgtaatagcccaaaaaaagtttgtgccccaacggtacgggctgcaggtaaagtgcgatcaagaacgcgataacgccgatcacaaacagcgtgacgatgacctgccatcgacggcgattatggccggctagacccgtgacgcagctgcagaggctaaaaagcacgcaagccaagaggcccgagaaggtcaccagcgtagaggaggagcaggcgctggccacgatcaccgaaagcgtcgtgagcacgctataaatggtgagcaggcccgggctcggcggcgacgtaaacgatccttcatcgcgtttgccatgcagcagggccaaacagatggtgggcaccatcaaactcaagggcggcataaagccggtgcaacagagaaagacggtgcctttaagatgcggaaaagccagcaccaggcccagacagagcaagaaggtgcaggtgccctgcacggccacggtgctgtagacccgcatacaaagtaaaaagcgacgtacgtcgttcgtcgagacggaggaaatcataatgactccgcgcgagggtcgcgggggtgggggcgcccaggccgtcccggtggcctctgagttcggagacatgacggcggtggctatcaaaaggcgcgtatgagaaaccgtttatagagtgtaatagaatcaccgtcattcccacacggcgttcccccataaagtcacgtcacactcgagtaagcgtgaaaaagctttattattgaataaaaaacacgagtacaacaccgagttgcggtgtcctgtctactgggtgggggaggtttatcgtctgtctctagagggaaggtggggaacgtctaagcgagcgggagcgtgtcatctcccccatctttttacaacaagctgaggagactcacgccgtcgatgcgtccgccgtgtttctcggcgtactgctgcacccagacgtggccgctaaagatggcgacgctcatgtttaggagactcatgacgatggtgtacaacacgacgctgacacagacgctgtttttagacagcgttccacgctggtagatgagatccagggtctcgtaaataagcacggccgaagcggcggtcaccaccaggacgtagagtccgctgtagatcttgctgacccacagcacgggcgaaaagtaaagcaataggtaaaagacgatgacggaccagccgtagccaatcccgatgactttccagcgcgtgggattgttgccggccaggtaggtgagaccgctgcagagaacgaaaaagaccatcaccagggcaaacgacagaccgatgacgcgcctttctccgcaaaagcccgtgcacacggtgatgccggtgttgatcagcaggcatgccaccgtgagatgagcaaaattggtggtgtgtgggcgaaactcggcgaaaccgcgtagcatggccagcgtggacacgggcacgatggaggacagggctggcactatgccgttggcgcactgtccctgcacatcggggaaggcgagccaagccagcaggcagaccgtgagggtacaagccagctgccacacgagcccgtgatagacctccatgagcagcttgaagcgtttcaaccactggaagagctgctgttcggccaccagcgcgtggctgcgatggagcggcacgatggtgaccgtcggcgactcatggtgttcggaaaccgaggcggtgtcgcccatgctgccgcttacgaccgctgtcggtctaaggtaggcgtcgatgaaacagtccgtcttatcagcacccggttaccgcggatttgattgacgtcacgagtgtggtcaaaccgtggcggcaccctgtatccgacccgtcgtcatgggctccacaaccagagcctcagaagatggtacatgccgatgaataaagccacattttcgacatagaggcgtagcgagggctgaaaactctccgggaaagaactctgacaggtgatcagggacagatcgtgaattagcatcagcgtcaccgtcaacagcgtcgtcgcgtgtaaaccgagaaagaacggggtcgcggcccgcagcagccaaagtcccagcgccgtagcgcagagcagagacaggaccgacggtagccacagccgccggagagacgcgccaggatcgcaacccaaaagcgaggcccccaggcagccgagatctaccgccagggcgagaagagccgcgccgagaaaggcctgcggcgacggctggcacatcagcaaggtcagaaaggctagcgcgtgcggcaggcagtaagccaacaggagtgggagtttgcggggacaacggtcgatagacggaccgcgtagcagcaggaacaggcagccgacgggcacgacgaggctgagatgagaaagcggcggtgggtcgtcgtcccgtccccgctcgcatagctcggccaccggtggcggcatgagccaccagctgagcacgctgagggcgacggtggcggtaagctggaaggcgacgaggacggaggcgcgcagccataccgccagcctctctaagtaggggactacctcctcgacggtccattctagcgggacgacatgaagcatggcgacaagcgcggctgctgtgaaaatgagcgcggttttataggcattaggacttcccgatcgtactggcggctgtcaaagtcccgttgtccaaagacgcgccgtccgaaagactaatccaacggggacccgagagcatgagcaacaacgtgagaaagatggccatgctgtccaggtagagacagacggcatgacggatgcactggttaggtgggcagaaaaagatgaccatgagactgtcgtaggccagaatacccaaaaagaagctgatggagaaggcgcacaacgtcaccactatcttctgcagccagtcggcgtcgcttagcagagcgagcgtgaggaacgaaagcagcatcaccacgtagacgcagctgatgcatttccaacgacgtcggtcacggccacctagaaacgccagccccgtaaaggagataaacaacgccagggtcatcacgtaggaacctactagtacgcggctttcagagcacatttggaagatggccgccgtcaggctgttggccaacagatagatgaaaagcaccgtggcgttactagggtgctcgttgcccaaagtgtacgtgatgaacatgcagacgatgggcacgagcacggtgagaaagaagctgtagttctcgacgcaaaagttgcggttttgtgggaaccccaaccaaaaaacgcttcccaagccgaagctgaaagccaactgaaagatgaagatggcgtacacacgcagccatacggtgaactttttgaaccactcgagagcctccatgcgggagagcagcagcgcgttagcctcctgcgcctgcatggtggcgacggtctcggcacaaagccgctgcggcgcacctacccttctcttatacacaagcgagcgagtggggcacggtgacgtggtcacgccgcggacacgtcgattaggagacgaactggggcgacgccgctgctgtggcagcgaccgtcgtagcgaccgtcgtctgagcagtgtgggcgctgccgggctcggagggcatgaagtagagcacggagacaaagaggtacatgaggtccatgtacaagcagagcgcgcccgggatataactctcatactcgatgtcgtgcaggatgtcctgcgtatcgcacaccaccgaggtcacgatgacggccaaaccggctatcatcaccaggatctcacttaccgcctcgggaaaaagagaaaatacggcgaacagtaagagaatcagcgtggatgcgcccgtcaatagggaacgctgtaattccacgtcgcgggcaaacagatacgtagcgagcgtaaggaaacaaaatagcgttactgtggccaccatggcataaatgactgaacgatgactaaaatggaagcctgacgccgtgacagccacgctggtaagcaacgtgtacgtcagtaagatccatacgtttttgggaaagttgggctcggcccaacgcaacagacctaggcacacgatggagatcattaagcaagacagcgtcagacgcacgctggaaaagagctgctccagccggtgcggcaacaccagccagcaaaaggcgcagacgctcataaggatgaggcattgcacccagataaggatgtagatgcgcagcaggaagaccgaccgggctatctggacctgaccgcggagcgacatggcggcaacgccggcggttatcgccgagattcgtctaaatacacgaagcgaactagaaaacgcacacacgttatttgcaaaaagaaagcagctgccggcttattattttattaaaaatttatctgtgcagaatcataagtttatgatgaataaaaacggggaaagggaatctgcttttagggacccgggtctggtccgtcgtctcccatctggtcgggttcggggatggggacctgtttcagcgtgtgtccgcgggcgtgcatggcttttgctcgccggccgcgctgtaaccaggcctctttctctgtggtcggcgagtcttccgacgggtagggagtctgggagtccatcgcttcaggcccaccgctcgttccctcgaccgtcgtgtcgtcctcgttttcgctattacacggggtttctggagtatcgcctatacggttggcgattctccgggggtggccgctctcgtcctcgtcgctgctatcgccgcccggtaattcgacgccgcattcgttgtacggagcgcggcacatgggcggcggaaagaacttgggcatgcgaaagcagcgttgtccatccacggtctgcgtggtttcatcattatcctcccataatcccccctgtagcgccggcagcgtttcgacgctgtgagaggggaaggcccagttctggttgtcttgcagcgcgcccgtgggcagtaggtccgtgcggccccaggcgctgctgttgttgggtaccttgtcagtgccgcgagtaggtcgcagaaaccagtccagagcgctctctagctgcgagcgtgtgatggtgcccagtgcgccgtgccagcgcagcacgtctcttttcagcgtgtggtgacagacgggcagctcctccaaccgacactcgccgcgcaatccgcggtcgaagcggcagagaccacgcaatttaagcagaccgcacttgagaaacatgtgaaaattatcggcaatgcgatacaggtctgagtcctcgatcttgtgtaggtagaccacgccaaacttgtcgagcagcaccaggccgctgggcacaaaaggcccgtaggccaggtaatagcccacgaggccgacgacgtaccactcgcagcacaagcgttgacgaataaagttcagaagatcgcgaaagtccgcggccggcatgtggtcaaaaggccggcaggcgcgcaggccctcgatggagcccagcatgagcaacggctccacctcggtgcgacccggcgtgcggatgaccaggttgagaccgctcatttcgcgggccgtcttggccacggccgcagcgtcagtggggtcggtgcagaggaatttttgcacatgatagcgcggttcggtggtggcgaacggcgtttgtgggtgccgatacacatattcgcaccagagtaggccgttcttggaaaaggctttgatatcactggccacctcgtagagcccgtcggtctcccagtcgtagacgtagacggtgccgtaatgacttagcatgagcacgcagggcagttcctgcgcctgcttggtgtttcgtgttagatcgctgtcgggtggacgcacggctagtacaccgacggcttccagggtgtcatcgcagcagagatagtcggcggccagagaacgtgcgtaaatctgcgggatggcggcctgttcgcgcatcactaggaaccagttggcggggttgcgcagtgctacggtggttccttggtggcgctgcacgtaggttctcagcgccggaggatcgtactggcgcagatagaggccttgcagcatcgataacgtcttttgaaagacggtgtttctaaattggaaaacgccgtagtcgcagcggatagcatcttcgcagcgctcgtcgcgctgtcggagataggtgccccaggcttcggcggcggctttggtgagtagggacatgccggcggagccgtctcgacagcgagtcggataaagcgcgctgcgcgaaagcttaatataggagcagcgtcagacgaatcgcggctggtggcccggggggtgggacgcgccgcctacacaaaatgctcccgaaaatcgaaactcttgacccactccggagacaaatccgtattcagattgatgcgtcgcgcttccacttcggcttccgaaacctcggcctccgtccggtaggcgttaacaatacgctgacccaggtgccaacgctctttctctgccaaacgccgttgctcaaaccactcgtctacgtccttgaggtcaaagacagtgtcctcctcaaggtcaaagcctaggtcttcccactcgtcgtcatcgctctcgtggccggcggccatacgcgcggcaaccgcgtcttcccctcctcttctttcaacgttgggtaccacgttgttttcttcgggttccatgggttctgcgccactatcgtcatcgtcctctccctgctcctcatcgtccgccaaggcgtcgtggatcacctccaggttctgattgtcgggtacgacgtggttatcttcgtcgtcgtcgcgtggcatgggcggcggccgacggcggacgaccggcatggcgcggccgtcgtttccttcgtcttcctcttcaccgtctcccaaggaacgcggtcgacgacgttccgcgaagtcgccgcggaccacgcgcgcctgccaaatggtaaacgcgtcccaaccgtcccagttattgagcatttcggcgcgaaaacggtcgcctcgacagagccagcgaaactgccgcgcgtagtcgcggtctacgccgctgtcgaacatggtaaagtgcagacgcgccgcctcgcccatgtgtacgcagcctccattgcgttccagcctggccgcgcgccgcagaccgtgttcgtagcggcgacgcacgtacaccttcatgaggccggcgcgaaaaagttcctctaggctgtcggccagacggtagatttcaccggctagacgctgcaggggcggcgagcggtccagatgcgacttgacaatcaccacgtaaaaacgacagaaacggtcgaagatgatgaggaaggacgtgtcaaagaaaccaccggcgcggtaggagcccacggcgcctagcaggtaccagcggcaacgcagttgcagcgtgacgtacatttcgcactcggccaagcgggcggctggcgctacctcgaagggccagcaatccgtcaagcagccgaaactggtcaggagtttcaacgttttggcatggcgcccaggtgtgtgaaagttcacgtcgcgtccgtggtgttcgccaacgcaggcggccaacgcgtcggcgtcatgagcgtgacgcagcagcatcgctaccacgtcgtgcggtacccgcgtagcaaacggcgtctgtggctgacggtatacggcttcggtgtacatcataccgtaacgtgccagctcgtccagatgacgcgcgcacagcagcagaatctcttgcgagggttcgtagatgtagaggcgcgtaccgccccccatgcagagcaccagctccgtctcttcgtagtgatcttccaccatgatcacgcacttgcctagcacgataaggcgttcggggcaacaaatcacgtcgtccagcagttggtcgcgcagctccggcatggtgctgccaggccgcacctgcaggaaccagttgtgcggaatgccgagcgacaacacctggtcgacgtggttacggacccagtcgcgaagcacgtcggcgctgtactggcactcaaagatgccctgaaagtcgctcatgacccgcagaaaagtttcgtagcgcgtgtggcaatagaggaattcatcgtttcgcgtgaacgtgggagctccgtcttcccaacgtgtacgccacatgtcaaaagaggccgccagctagacaccccagaaaagaagcagagaaagagagttctttgtgcgacacgttttattccgcgtcctccgctcgacgctcaaatctggatgtactcgcgcacacccgtcaggctctttaagggaaaagggtccgagtacgtcactaaccgcgactgatgcaccagggcggtaatcacccgctctgcgccctcgcgcgtcgacgaacgcgtcgtcaccaggcagtgcagccgcgggcccgtatcgtcctgatgaccagcggcctcgcgctcggctgcttccacaccgacaatgtcgggatccaacacgtagctctgcgagttggtgtcgtagcggtgtaacaccaacgtgttggggtccagacgctcccacgcgccctcgtgcgggtcaaaacgctccgttaaacagagccagtcatactgctgctgcagaatacgccgctcgcgctcgcgtcgctcatcgggcaacgcagcgtcttcgttgaagagaatgtcccgcttgtggtctacggcacgctcgtggtggtgcgggcacagatgacggtgttccatacgcgtctgacgctgacgctcgcgttcgaagcgccggtgtcgaaagaccattttcagcaaccccatgcggaaaaactccgtgatggtgttggcaacgcgccgcacatagtggttggggtcgtccatctggatggcgtacacggcaccgaaccagtccagcagtaccagcacttcggccacaaagttgcgtcccggtcgcggacgtcccgtcacgcctagcacataccacggcgtggccagattagcacggacagcccaccaccaacgacggctctccacctcggtgagcgcacagaagggccaaatgcggtgtaactgctgcaccgttttcatcagccgcataatcaccgtaccgtaacccggtgtatgcaacttcacgtcgcaacccaggattcgttcggccgtggcgtacgagccctcgggcgtggtgtcattgagaaacaaaacatgcatggtacgcgcgcccttagggtatcgtcgcggaacaggtaccgtcattctccgcagagtggtgtgaatcacgtcgcgatacgcaatctccgaacgcgacacaccgtaacgtgccagttcatccaagttgtgcgatactaacaccatgtacttttcacgagtgtcgtaggcgtagacgcgagaaaagcgacccataaaaaccacgtacggggtagccaccatgccatcatggtgatcgcgacgtggctcgggcaacaaaataacagcgtatcccaacggcgtcagcggctcgcggcaacagatgagctttgacgccgcctgtctggcggcggtaatgatcccgtcctccgtacgtaacatcacatgccagcccttggggggacccaaggacagacaacgtccctcgttacgatgaacgtaacgcgtgatttccattggctccaggcaaaagaacagttccttaaaatcccgcaacacttgtcggtataacgccatgggatcctcggccgccacaggcagcgcggggagctccggcggcacaactgcagcgccgtcagggccagaacccgcagccggatccatcattacgcgacactctcagccggacaaccggcgtcactgacagaagccgagccaaatacagagaaagcaacgctacaccgtcaccccgctcccaagcgccgcggaaagtgctccgatttttcaccgtcgttcgcgacgttgatttgcctcggtctgagaaccgacctagcgttcggaccggtgcgcagaaacagccggcggtccgagccactgagcggttcacagccccggccgccgatagttaccggagagacgttcgagctgcaggtacatcggcgctccccgcttcgccaccccgcgcccgccccagtttatactctccgacgccccgtccaacgcgcctgtggagggccaatcggaccgcgggagctctccaagtggatgacaggcacagccgggtgcccgaccgtgaagagccctcatccacctgaacagaccgctaaccgaaggaccccgagtcgcgtccgtcggtcccgacgtccgtcgccatctggctccctgctgttggctacctctcggatttcaaaaaagagcacgtgccgatgacggtgcacaggaaagagccaaagtgtcacggcgtctttttttatttgtattcctttcctgttttgtactcgtaaactgttgacgttgtttttacatccaaaagggcaagtaagaaacaggatgaggcatggtaggtttgggcgtggggcggccctccagcacggcggcccgggccgcccggcgggtgagcacccggcgttgcgccgtatctatcttgtgtttcttctgtgtctttttcctatcttgttccgcgacggcctctttcatcacgttcagcatgcgttcctcgacgccctccagggatcctggggaggagggagtcctagtgaggcttccaatgttgttttgtggattttcggtttcctcttcttggtcgtcatcgtcggacgtgtcgtcttcctcttgatcctcttcttcgtccgagtagtagacgcatagtccctggttcatcaggctgggattcatcaggttctgacggggaatccgctgttgtagacgtttaaccgcccgttccaggcgagagctcatgccgcaccagacgctgtaacgccgcacgggcccgtagcgggctgtttgttcgcgtacatgatcgttgagctcttgccaatattgtttggcacactccagatcggaggtttgtggatagtcgggtcggatccgcggatcccaactgacatcggcggtgccagagacttcgtccagactgttacgcatagagcaccagtcgggtcggacgataaacctgtccttgcggattaaccatttataacgtagttcgtgatggcgtgtagaggcccgtacacgctccacggtcccaaagcggtcccagaagggaaagttttcgtgggggcagcgacccggcacttccaaacgttcggcgtcgtccacggcgtagtggaaacgccggccggcctggtaaattttgagcagacccacggttaacaacatatccacgctgtcagccaaccgccagatctcgcgccgagatacgtcaaaatagaaaaattcgcaggctcggtcgaccaggatcacgaaatcggcgtgaaaaacgccggagggtagcgactcgcccaccacacccattatcatggtttcacagcataagcggtccacaaagaacttcaacaggtcgttgaattgctccgtctccatacagatgaagggccagacgcctttgaggttctcggcctggccgcagagcagcaacggacgcgtcatctcgcctggagtgcgcagaggcacgcattcgccgcgataacgacaggtcacacgctgcagttcgctgatgctgttgtcgtgcaggcgaaggtcgcagataatatgatccggttgcgtggttagcagcggcgtgcgcatttgctcgccgtagatggcctcgcagtgcaatagcccgtgtcgtgcaaaatcgtccagactgtgcgccaggtagtaaagcaccccgcgatcgcggtctagacaccacacggtttcgtaacgtcctagcagaagcaccagacgggcctggctaggtggctcaatttcctctacatacacgaaaaagtcgtcatcgtccgagtcctcgtcctcagaagaggaccgcggcccgtgtactctgggcaacacggtggtagagaactgcaggacgcccagagactcgagcgactcttcgcagcagatgagctgaccccagggcgtttctggcccgtcggtgacagccgcgctgccaaagatgtcctcaaactctacaaaatctagacgccatccgggtggcgctgaaacgggaaggctaatgttcatatcagcatagctacgaactaagtggcggatgtcctgccgcaagtcttggcagagaatgagctttcgtaaacccttgagggtcctccgaacaacggccccagacgcgtagcgataggactggcgcatggtgccgcggcgtggagcggcacttggcagcctattttatggagtttcttcagtgacgtggcttgttcacgtcgttcgtgggctgcggttggcagctccggtctgtaaaccacccgaaaagactgacatcgacgtcaaagacccacgtaatttggaacatgtgcgaccgcaaagtgcgtcagaataacacgtggctttaggacataaaaagtaccgtgaggtccagacgtggtttttgtgattgacacttacaccaggtaagccaagggacggtgaaactgtatgtgaggaacctgggtgcttagacgactaacgtgtaatgctttttacaggactgttcgacaggtgatagtacctgtaaggtgatgaccacctctacaaataatcaaaccttaacacaggtgagcaacatgacaaaccacaccttaaacagcaccgaaatttatcagttgttcgagtacactcggctcggagtatggttgatgtgcatcgtgggcacgtttctgaacgtgctggtgattaccaccatcctgtactaccgtcgtaagaaaaaatctccgagcgatacttacatctgcaacctggctgtagccgatctgttgattgtcgtcggcctgccgttttttctagaatatgccaagcatcaccccaaactcagccgagaggtggtttgttcgggactcaatgcttgtttctacatctgtctttttgccggcgtttgttttctcatcaacctgtcgatggatcgctactgcgtcatcgtctggggtgtagaattgaaccgcgtccgaaataacaagcgggctacctgttgggtggtgattttttggatactagccgtgcttatggggatgccacattacctgatgtacagccataccaacaacgagtgtgttggtgaattcgctaacgagacttcgggttggttccccgtgtttttgaataccaaagttaacatttgcggctacctggcgcccattgcgctgatggcgtacacgtacaaccgtatggtgcggtttatcattaactacgttggtaaatggcacatgcagacgctccacgttcttttggttgtggttgtgtcttttgccagtttttggtttcctttcaacctggcgctatttttagaatccatccgtcttctggcgggagtgtacaatgacacacttcaaaacgttattatcttctgtctatacgtcggtcagtttttggcctacgttcgcgcttgtctgaatcctgggatctacatcctagtaggcactcaaatgaggaaggacatgtggacaaccctaagggtattcgcctgttgctgcgtgaagcaggagataccttaccaggacattgatattgagctacaaaaggacatacaaagaagggccaaaaacaccaaacgtacccattatgacagaaaacatgcacctatggagtccggggaggaggaatttctgttgtaattcgatcctctctcacgcgtccgccgcacatctatttttgctaattgcacgtttcttcgtggtcacgtcggctcgaagaggttggtgtgaaaacgtcatctcgccgacgtggtgaaccgctcatatagaccaaaccggacgctgcctcagtctctcggtgcgtggaccagacggcgtccatgcaccgagggcagaactggtgctaccatgacgccgacgacgacgaccgcggaactcacgacggagtttgactacgatgaagccgcgactccttgtgttttcaccgacgtgcttaatcagtcaaagccggtcacgttgtttctgtacggcgttgtctttatcttcggttccatcggcaactttttggtgatcttcaccatcacctggcgacgtcggattcaatgctccggcgatgtttactttatcaacctcgcggccgccgatttgcttttcgtttgtacactacctctgtggatgcaatacctcctagatcacaactccctagccagcgtgccgtgtacgttactcactgcctgtttctacgtggctatgtttgccagtttgtgttttattacggagattgcactcgatcgctactacgctattgtttacatgagatatcggcctgtaaaacaggcctgccttttcagtattttttggtggatctttgccgtgatcatcgccattccacactttatggtggtgaccaaaaaaaacaatcaatgtatgaccgactacgactacttagaggtcagttacccgatcatcctcaacgtagaactcatgctcggtgctttcgtgatcccgctcagtgtcatcagctactgctactaccgcatttccagaatcgttgcggtgtctcagtcacgccacaaaggtcgcattgtacgggtacttatagcggtcgtgcttgtctttatcatcttttggctgccgtaccacctgacgctgtttgtggacacgttgaaactgctcaaatggatctccagcagctgcgagttcgaaaaatcactcaagcgcgcgctcatcttgaccgagtcactcgccttttgtcactgttgtctcaatccgctgctgtacgtcttcgtgggcaccaagtttcggcaagaactgcactgtctgctggccgagtttcgccagcgactcttttcccgcgatgtatcctggtaccacagcatgagcttttcgcgtcggagctcgccgagccgaagagagacgtcttccgacacgctgtccgacgaggtgtgtcgcgtctcacaaattataccgtaataaaaaagcgctacctcggccttttcatacaaaccccgtgtccgccccttttttccccgtgcccgatatacacgatattaaacccacgaccatttccgttcgattagcgaaccggaaaagtttatggggaaaaagacgtaggaaaggatcatgtagaaaaaacatgcggtgtttccgatggtggctctacagtgggtggtggtggctcacgtttggatgtgctcggaccgtgacggtgggtttcgtcgcgcccacggtccgggcacaatcaaccgtggtccgctctgagccggctccgccgtcggaaacccgacgagacaacaatgacacgtcttacttcagcggcacctctttccattcttccgtgtcccctgccacctcagtggaccgtcaatttcgacggaccacgtacgaccgttgggacggtcgacgttggctgcgcacccgctacgggaacgccagcgcctgcgtgacgggcacccaatggagcaccaacttttttttctctcagtgtgagcactaccctagtttcgtgaaactcaacggggtgcagcgctggacacctgttcggagacctatgggcgaggttgcctactacgggggttgttgtatggtgggcgggggtaatcgtgcgtatgtgatactcgtgagcggttacgggaccgccagctacggcaacgctttacgcgtggattttgggcgcggcaactgcacggcgccgaaacgcacctaccctcggcgcctggaactgcacgatggccgcacagaccctagccgttgcgatccctaccaagtgtatttctacggtctgcagtgtcctgagcaactggttatcaccgcccacggcggcgtgggtatgcgccgctgtcctaccggctctcgtcccaccccgtcccggccccaccggcatgacttggagaacgagctacatggtctgtgtgtggatcttctggtgtgcgtccttttattagctctgctgctgttggagctcgttcccatggaagccgtgcgtcacccgctgcttttctggcgacgcgtggcgttatcgtcgtccacttccaaggtggaccgcgccgtcaagctgtgtcttcggcgcatgctgggtctgccgccgccaccgtcagtcgcaccacctggggaaaagaaggagctaccggctcaggcggccttgtcgccgccactgaccacctggtcactaccgccgtttccgtccacgcggatacctgacagtccgccgccaccgtaccagcttcgtcacgccacgtcactagtgacggtacccacgttgctgttatatacgtcatccgacatcggtgacacagcttcagaaacaacgtgtgtggcgcacgctacttatggggaacccccggagcccgctcgatcgacggctacggttcaggaatgtaccgttcttaccgctccaaattgcggcatcgtcaacaacgacggcgcggtctctgaaggccaagaccatggagatgcggttcaccatagcctggatgtggtttcccagtgtgctgctgatactggggttgttgacgcctccgagtaacggctgcactgttgatgtcggacgaaacatgtccattcgagaacagtgccgccttcgaaacggtgcgacgttctccaagggagacatcgaaggtaacttcagtgggcccgtcgtcgtggagttggactacgaagacatcgatattactggcgaacggcagcgacttcggttccacctcagcggactcgggtgtcctacaagggagaaaataagaaaagataatgaaagcgacgtcaacggtggaattcgctgggctctatatatacaaaccggcgacgccaagtacggtattcgtaatcagcatttgagtatacggttaatgtatcctggggaaaaaaatacacaacagctgttgggttctgatttcagttgcgaacgtcaccggagaccgtccacgccgttgggaaagaacgccgaagtgcctcccgcgacccgcacgtcttctacatacagcgtcctcagcgcttttgtagtgtggatcggatccggcctcaatatcatctggtggaccggcatcgtgcttctggcggtggacgctctcggacttggcgagcgttggctgaggttagcactgtcccaccgggacaaacatcacgcatcgcgaaccgcggcgctccagtgtcaacgcgacatgttacttcggcaacgtcgacgggctcggcggctgcatgccgtttctgaaggcaaactgcaggaagagaagaaacgacagtctgctctggtctggaacgttgaggcgcgaccctttccgtccacacatcagctgattgtgctgccccctcctgtagcgtcagctcctcctgcagttccctcgcagccccccgagtattcgtctgtgtttccgcctgtataaaaataaagagacgggaggctgatcgcggccttcagcgtctcatttgtctttactctcgagtgcggtcggtgtctcgtcggtgagacgaggccgccgcccgacaagttcgatctcatgtcgctcttggagcgcgaagagagttggcgtcgcgtagtcgactactcgcacaacctgtggtgtacgtgcggtaactggcagagccacgttgagattcaggacgaagagcccaactgcgagcagccggagcccgcacactggctggaatacgtggcggtccagtggcaggcccgggttcgcgattctcacgatcgctggtgtctctgcaacgcctggcgtgatcacgctttgcgcggccgttggggtacggcgtattcctcgggttcctcggcctcttcctccggtttcgtcgcggagagcaagttcacctggtggaaacgactgcgccacagtacccggcgctggttgtttcgccgccggcgagctcgatacactccatctaactgtggggaaagtagcactagcagcggccagagtagcggtgacgagagtaactgcagtctacgcacccacggcgtgtacacacggggtgaacaacactaatcgataagtcgcgtgtaggcgactggctacatcaaccggatatctgcggggatttaaaaagacgacccgttgtcatccggcttagagcaaaccgtccttttatcatcttccgtcgccatggctatgtacacatccgaatccgaacgcgactggcgtcgtgtaatccacgactcgcacggcctgtggtgcgactgcggcgactggcgagagcacctctattgtgtgtacgacagccattttcagcgacgacccacgacccgagccgaacggagggccgccaattggcggcgacagatgcggcggttacaccgtctgtggtgtttttgtcaggactggaagtgtcacgcgttatacgccgagtgggacggcaaagaatccgacgacgagtcgtcggcgtcttcctcgggcgaagcgccagagcaacaggtccccgcttggaagaccgtgcgggccttctcgcgggcctaccaccaccgcattaaccggggtctgcggggcacgcccccaccgcgcaacttgccgggatacgagcacgcctccgagggctggcggttttgcagtcgacgggaacggcgagaggacgatcttcgcacgcgggctgagccggaccgcgtggtgttccagttagggggagtacctcctcgtcgtcaccgagaaacttacgtgtaagaacacggcgtgacaataaacaacatagcgtaaatccccgtgtgatgtgtgtgattgacgttcgggaaacatgtccccatcatcagcgtcacaactgacgtgggttggtcactgacgtgcaggatgttgcgcgagtcagagaatcgcataagaacggggtggtgagcgggttcccacaggagtctctggcgcaaaagcaccatgagcctcaggttccccgagagggcgggttacgagaaactgggataccgcccgcatgccaaacgcgtgcgggtgcatgacccgttgggattgacgcggtttatcatgaggcaactcatgatgtacccgctggtgttgccgttcacctttccgttttacgtgccgcggtcctagcacgtcagtggtgatgctgataattgcaacatggcccatgacgaacccgcttgggacgaacgtcaataccacgtcaaaccaccgtgacttggctgaacgttgaaacataaagccaaagcgccgtcggcacttggcttcagagcagcgcctcggggcgatgcgacggcgatgaacttagagcaactcatcaacgtccttggtctgctcgtctggattgccgctcgtgctgtcagccgcgttggtccgcatggctccggactcgtttatcgtgagcttcatgatttctacgggtatctgcagctggaccttctgggaccagtggtggcggggaatcgctcagtccggacctggaaagagcaggcggaccgagccagagggaccttcgttcggcgttcaggccttaatactagctacatcttacctgtcggcggcctgtctgggggctccggtaccttacccgtcggcctgtatcgtcccgaagaagaggtgttcctcctcttgaaccgctgccatgggccactgtcaacgccgaaaaatgcttgtctggctgaggtcggtgtcgctaatgccacttttttgtctcgcttcaatgtcggtgattttcacggagcgtcatgggaaaacggtaccgctcccgatggagagcccggggtatgctgaaattcctcttaagattccgtaaacgacgttgtccagtcgttgtgccgcgattcgtacggttcatcgtctacgtcgttttgttcaccgtcgctgtgcaacgcgtgaaacaagagcgtgatgcgcaccttcggcggtatgaagaacggttacggaaaaaccgcgcacggcgtcggcagtcttttccgtgacttggggcgatgggtccgagctgcggtatgggtcacggcggcgtgtgttttattgacgaagatgccgatgtgtgactaaaaacgtcccagccctagagcgatgtgtttcaataaaaattatgtcgtatcatagtatgcgtgtcctggtttttcatttttggatgtatttgtgacataaaaggcgatagaatgtggggacgaaacatatccagatacacagttttgttattcgaacaaaacccgtgtgatgcagaaaacagtactgcaggatgaaagtcccatgggggggggggggcagacagtagtcgtttttgccgctgggcgtacgctatgcttgtatttatgactataatatgtgcactcgtgtgtcgatgttcctattgggaagggtgtcaatgtaggaggtataaagaatggtgggatgcggagaggcatcgctagacacaggttgatcgctgtgctagccccacctgatcagcgtcatgggtaaagcggtgattaagcgtgaaaacaccgtaagggggggggggcagacaggaagcttggtggcagtggccgttagatgcattacgtgtctgtattggtacatttgcaaaccgtcgggtgtggcggtatagtttagcgatgattatattatgtatgtgccgtatagaatggcctaaaacattgtaacacgaaacgttacaatgatgggaaagatgccgataaaaaacacataaaaggcatatacacgaattactagttacacgtttgtctatgtgcgagtttaaggacgcttgtataatgcgtatgacggcaaacggccgcggaaacgatggggggggggggtagtaactgtattaattatacgtcttgcagtacacggtattgtgtgctggtgcgcgtattacgacacgaacggcatagcgctataaccgggtgtatggtatttatatgtgcgtctagcatccttgcgagattctgaaagtcttcttgtaagcgtaattaaaacggtgtatgttctgcgtaaagtgcattcaaacaacgtaacagtatgggatgaatgccaataaataacatataaaagcgagaagtatacatataagggttgctagacacaggtttgtttctgtgctagcccaatggcacttgtacaatccatgcaagcaaaaaaaggatgcgaaaccaacatcgtggggtggggggggggtaaaagcaatgttaatcattggtctcgcggtgcaagttgctgcgttttacgtgtattgttacacgggttgcgtatcggtataatcggatgtgtgttactcattcgtggcgttgttatagtattgtgaaaaagaattctcgtaagcatgttgacaactgcaaaataaaaccattttattgagcattgtaatggtagtgtgtcgctacattagaaaacgtgacgcgtcgcatgtcgcggcacaatctggcagcggggtcggggtagggtacggtgggaggcatgtacacagatggaacaaaagcagaagtaacgtgagacggagcatatagtccagtatccagcggttcctgagtagcaccacccatcaactgaatgccctcatgagtaaaagtctgcgggcggcagcccttggggaccgttggcatgggacgatcgatctccaaaccacagcgtaacacggttttcttccaacgtcgttgatacacgtcgtttttacggttactccccagaacccagaaagtctcgtccaagtcgtaccaggagtcttccccagggagacgtggcggtttccaatcctcatcgtcccgtcgcaaagcacgtcccaaactggcttggggagtcaacggtggttctgtgggtcgggtgtagcgcgagtgttttccgttcatgagcgattcgtcctccttgcctttaggctttttggcctttttgtgtatcatctggccgccggcctccataaccaccgtggccaagtccagtcccagagcttgagcgtcggcgcggcgtcgggcgtcttgcaggtagtcttccacatttgcacagatggccgggtgtttggtggctagggtgaggacctcagcctcgccgcggcccggacgtagcaaaaaagctaactgcccgtgcggctcgcgcgcccacagcgcggcgcgcgggtgcaggtgcagcgcgtcccagcgcggccgctcccactgctcgcggtccagctcgggcagcagccgccgcgcggcctcggcggcgggcgccgactcgcgccccagcgccagcgcgcccaacacgcccgcgcgcagaaagtgcgacagctccgccgccagcgggtacacgtgcccgtccagcgggcagtacccgaacacggcgcccagctcgtccagcaccaccaccagcatggcgcgcggcacggtccccgacgccgccggacccgccatcgccgtcggacccaccatcaccgtcggcgccgccgctgctgccgctgccgcatccgttccgaccaccgcgtgcgcgtccgcgtttggcacgcaaatcgcgctcccgccggcggcgccgtacggctgcggaggtaaagtcacagcagaccccacggctcccgccatcgcgcacggcgcgtccccgccggcggcctccgtctccgtgccgctcgcccccggcagcaacgtcgtccccgtcgccatcgccgtcgtccccgccgtcatcgtcgtcgtcgtccccgccgtcgtccctgtcgccggccctgccgcgcagcgcagccaccgcgacggcagcaccgcgcccagcgccagccagccgcagcacagacgctggttcaggtgccgacgcacggccgtcagcagcgacgcggggtgcggcgccgacgcgaacggctcgtactgcgccagctcctgccacgcgcccagcagcaccatcggctgcagtcgcctgcccggcgtctgcagcgccaccgtcgtgccggcccaccgccggcgcagctcccgtccgagcgccgtcgcctcctcggcgcgcagcaacgtctggcgaagcgccggctgaggcagcagcgtcgcgcgcggggtgcccacgcccagccggttgcagcggtacaggcgcaccacctcgcccgcgccgtgccgaaaccactcgtccgcgtcgcgcgccgccaggatcagcgtgttgttcgccaggtcgtacacgaacacgcggaacccggcgcccagcgccaggtacagtccgtcctgcgcgcacagaccctcgggatggccggccttgtcgcccaccgtcgggtcggccgcggggtccacctcgtgcaccacggtcgccaccagcacgatccacgcgtcccgcggcgacagctgacgcaggtccgtggcgcccacgccgttcatctggctgcgcggcgtcactcgcgcgtagaatccgtacggccgtccgagcggcagcagcgtgcccgcgtcgcgctgcgaccacttgcgcatggcgcggcccgtgctgttggccaaaaacgcggcgcgccacacggcgcccatggcctggtattccagctccgtcagcgcctggcgctccaccggaatctgagacagcagcaagcgctccgggccgtgccaaaaggtgctgttgttgccgctacccggaggggcgcccggcggcccgcggggttctacccggtggacggcgtgggccggcgtcgccgtacccgcagtactcgtactagtccccgctgttgacgtcgcttccaaagaagaagaacgagaggaaccaacccccgaaggccctccggctccgcggccgcgaccgaggggcggggggcgcggcgacatgccgttgcgctgggccatggccgccggacgcctccgacgtccactctgtatatataggaagcaaacccgcgtcagcgaccacgccgtttacacacgcggacgcctccgtcgcccgtgtgccgcgggcgacacgcacctggcttttataggcagcgacgtgcacggcgcttgctggcgccgccttgccgccgcgcagtctggaaggccgtgaaaaaaccgaaagaagatgcgcgacaagccaccaacaacgggccgccgagcgcgcgcacacctaggtggacgcctgacctccattccgggccgtgtgctgggtccccgaggggcgggggggtgttttcatcgggggggtgaaatgtgggaatttgggaagttggcggtggcgggggacggcgacggcgaataaaagcgccgtgcggcgcgcacggcgaaacccagacgcgcgtgtgtcttgcgtctctttcagtcgcgcgtctgtcttgcgtgtctttgagtccccggggaaaagaggaagcggtcccgaggggacggcggcgcgactccctggggacgcgaagatcggacgcggaaaagaggaagtccccggggacggccacaggcggaaaaaaaaaacgaggaagccgcagcccagtctgccgggaccggcaggcaggcgcacagacccgcgtcgaggacacacgcagaagaagcgcccgcgccggggcggggggggggatcgcgggccccggggcacactgcttccatctggccgcgcgcacaccccgccgacacacccctgacacacccgcgacacacccggcacacgcccgcgacacacccggcacgcgcccgccacacagccagccgacacacccgcgacacacccgccacacccagccgcacccggcacacacccacccagccgcacccccgccacacccagaccgacgccggtgcgggwccggg

SEQ ID NO: 44 - DNA, 237559 bp, synthetic construct
  source 1..237559: mol_type = other DNA; note = Vector 4
swccattccgggccgtgtgctgggtccccgaggggcgggggggtgttttcatcgggggggtgaaatgtgggaatttgggaagttggcggtggcgggggacggcgacggcgaataaaagcgccgtgcggcgcgcacggcgaaacccagacgcgcgtgtgtcttgcgtctctttcagtcgcgcgtctgtcttgcgtgtctttgagtccccggggaaaagaggaagcggtcccgaggggacggcggcgcgactccctggggacgcgaagatcggacgcggaaaagaggaagtccccggggacggccacaggcggaaaaaaaaaacgaggaagccgcagcccagtctgccgggaccggcaggcaggcgcacagacccgcgtcgaggacacacgcagaagaagcgcccgcgccggggcggggggggggatcgcgggccccggggcacactgcttccatctggccgcgcgcacaccccgccgacacacccctgacacacccgcgacacacccggcacacgcccgcgacacacccggcacgcgcccgccacacagccagccgacacacccgcgacacacccgccacacccagccgcacccggcacacacccacccagccgcacccccgccacacccagaccgacgccggtgcgggaccgggctgaggggggtgtaagcgccttgacgcgcggcgctatggcactgcgtgccacggtattggttggcgggacgaggctgaggggggtttgcgggacgtaagcgcgacgccgagtttgcggcgtgctgtggcgcgctcaaggctagggacgggggccgcgcgtagcttttcggcggcgacggggaacaaaacaggcacgcacacgcagctcgcttcagcggtcgccctatcggcaccgccgctattctttattaacgtcgttctccccccgcttctacacgcggaccgctgcagacggctatgctcagactgtttctcttgacggcgacatgtgtttgcgtctgtgcggcgcggcgacggccgcaagcggacgacgccgcctgccaccacacgtggcccacgcgctgcgccggcccgcgtcccgcgccgtcggctcacaacacggcgctttcttcctcgcacgccatctccatcgcacaccgtgtgctgcattcgccgtcgcctccacgagagaacatccgccacagcatgcgctgtcgccgtcgcgccatggcctcctcggcttgcacacccgtttcgcacacccagcctcgggccgccaaccacagccgttcgaggatgacgtacgcgacgagcgagcccaccaattctcccacggcctcgcccgccaagtcagacggtggtgttgcctgcggcggggacgggggttgcgctgggatcgggggtggcgccggggacggggggctttcgcagcggggaacacacaccgcctatttaacctccacccgctacaacacacacatgccgcacaatcatgccagccacagacacaaacagcacccacaccacgccgcttcacccagaggaccaacacacgttacccgtacaccacagtaacacacaaccgcaagtccaaacctcggacaaacgcgccgccgaagaccaccgcacgcagatggagctcgacgccgcggactacgctgcttgctcacaggcccgccaacacctctacggtcaaacacaaccccaactacacgcataccccaacgccaacccacaggaaagcgctcattttttcacagagaatcaacatcaagtcacgcatctacttcacaacattggcgagggcgcagcgctcggctaccccgtcccccgcgcggaaatccgccgtggcggtggcgactgggccgacagcgcaagcgacttcgacgccgactgctggtgcatgtggggacgcttcggaaccatgggccgccaacctgtcgtgaccttactgttggcgcgccaacgcgacggcctcgctgactggaacgtcgtacgctgccgcggcacaggctttcgcgcacacgattccgaggacggcgtctctgtctggcgtcagcacctggtttttttactcggaggccacggccgccgtgtacagttagaacgtccatccgcgggagaagcccaagctcgaggcctattgccacgcatccggatcacccccctctccacatctccacgcccaaaaccaccccagcccaccacatccaccgcctcgcacccacatgctacggctcggccagatcacacgctctttcctgtcccttccacaccctcaaccacggttcacaatccccgaaactacgccgtccaacttcacgccgaaacgacccgcacatggcgctgggcacgacgcggtgaacgtggcgcgtggatgccggccgagacatttacgtgtcccaaggataaacgtccctggtagacggggtagggggatctaccagcccagggctcgcgtatttcgccgccacgctgcttcaccgatatccaataaacccatcccctcgccacgacgtctccgcgtatctttgtagcctcaggaatccgtccccacgtccacccatcccgagcactccacacgctataacagaccacggacacggcaaatgcatgcaaacttctcatttattgtgtctactactctgtgttgctacagggggtgaaggcaaagaaaaaaaaaaggaacaaaataatagattagcagaaggaataatccgtgcgaccgagcttgtgcttcttttcttataaggaggcaaatatactagggaaaacataagaataggaagaaaccgaggtttgggagaaaagctgagataaaatagcgcattttccatacagaggttgttgtttttgtggatcctaagaggtttcaagtgcgaatcttaaagttctcacgagaatattgtcttcaagaatcgacaactgtggtccaagatttttttttggtctttttaggttctgcgagggacatcacgatggatcgttgcgatgaagtcacgcgtacgcctctggtgtggcgcggtgtcgtgacaggagagtgtgttttcagtgcagagctgtcttgattcctatatccgagtatctgttttctcgtaaggacggtaatcttctttggtgtaagtacatctaaaagctgcaaactatattttaagggctgtctctaggtgtactttgatgctggagtttttcgctgtgttgatgtgaataaatctactactactattatatgcagaaagagtgattatgccgagacaagattgcattggctgaactgtttcaaaaacgcctacactctacttatccgtaaacctaaggtaatactatgtgtaagttgttttttttttctttttgtagtaaaatggtgatacgtgcaattaaaactgtattccatgtttccatcctttcatttcaactttaaaggcggctttgagagcgaagaagtgcgaggataaaaatggatgactccttcgtgtccagggagtcgactactgcaacgctgattgattaaaagatggtctccgatgatgatgttgttattgatcgaatcatggtgcagaacggcgacggagaggagcgtgtccgccgccgggaaggtggtctctttctcttttcttttttcaagaaatcttccatgtgtttatcgtagtgatcgaaatcgactgatctcgggttctttttgttggtttcttttcggttaatcatgtattgttttctttttttacagaaagatacttttttcatgagcaattcctcgcccggcgccggcatgccgaggtggggccactgcgatcagcggcatgccgacgccgacccggggatcttggattcaccgttttctctcttctctctctacatacagaccgggtggcaggagcggtaaggaatcatcgtcgtctttcattcttcgatgattatggtaatactaaatcttatctaggagcatatacatctaagattggagtactagtagtcgtttgtggtttctatttttttttatatttatctatgacagtttttctgtttttcgttttgataataatataataaaaactcatggacgtgaaatctggcttggttgtggtgatttcattctcattattgttgttttctttccgtcttgcggatgaagatgttgcgatgcggttgttgttggtgttgctatacaccgagagagatgatctttttgttcttctggttcatttcctatgattgtttggctgctgaccgacgcgtcaggatgtgcagggcatgcggggaatcaggaccggacacgggataatttcatctacctatacggagatcgcggtcctcgccatgaggatcgcgacaggcgcgtcgagggggcaggaacacccttgcggattgacattcttggtggtgtttcgttgttgtcggtagttgttgttgacgatgaggataaataaaaatgaccttgtttttgttctgttttctcttgttgggaatcgtcgactttgaattcttcgagttatcggaaagctgaggtacccaaatgtctgtagcttttttctttttaccctcttgtttatcatctgcgattcgtggtaggtaggagagggaaatgataatccgagattaaggaaaggagaagataaaataaaaaaaaaataaaacagaagccgaccggccgccgacccgttccccaggaccagcctacgaggaacggataacgcggtggcgacggcagcggtggtggcgctgggggtggcggtagtggtactgctgatggtagtcgggacggaggagagacgatgcatacatacacgcgtgcatgctgcatgggtggatggtccgaccgggagacgcggaagagaaactcacataaaaaggtgacaaaaagagcggttgaaaaaagaaaacgagattcgaccagacagaagaggaggaccggggcttggcgacccttccacgactgctgttgtcatctcggctcctccgtcttctcccggccacgggcggctaagtcaccgccgttctccccatccgtccgagcgccgaccgaccagccggccgattcgcccgccggggcttctggagaacgccggggcagcagcgatctggagaagccgctaaacccctgcgtttttatatggtagctctgccgagcgcgggctgacgcgttaagtaagcggaaagacgtgtgtgacgaaaaggggtcccatggtatttcacgtgacgatgaggagatgcggtttggagcacatacggtttagaaaaagggagttgtcgtgacaagggctgagggacctctgtctccatgtgtgtataaaaagcaaggcacgttcataatgtaaaaaagaacacgttgtaaacaagctattgctgtatcattcggctgactatgcttcattcggactgattttcttttcctaacggcgtaacttaaagtgattaacgtatgatatttgttccccagagttatactatagtcatcatcctaaaattcagatataaatgaacacatgtcgtatgagattattaagaaaccgaaaccacccatagttcaccatcctcttcatcattcagccgatgacccactccgtacaacgactcagtctgcttcgtcatattgcaaagcacaagcgacgtatgtgaacaacttgaaacacagactgtgttattaatgaccgttgtaccattactagtcacattgcataaagatcctccgccgtcgtcccatcttttccactcggtggaaaaccggtcgctatcatcaactatggtgagattttcaccctgcgtggtattcagtttcttcatattcataccttggattccattattaaaccccaatattaagcacgttattagtaccccccccccccaccaaggaatgtgactggaccggttcctagcagctctgggagccatgttcaggttgaaccacagctacagcgaaaccgagtccagtgaccggtaaccacgtccagcccctgcgtatgtaccagtccaagcacgtccggtcattgttctacacaggaaatctaactaggtcaacgtaattttattccaccgttacgcagaatactaacaaaaaactacacaaatgtaacggattacacataatttattacgtgaaaactgtaagaaagccaattcaccaagcgatacatttatttgacttccaagtgccacacatcaccactatattcatccatgttttcaccgaaccaacgagacagatcgaagaagccagaatcttccgactttaaattacataaatccaacgtattatgaccacagctcgacacacaaatagttgcgttactattcacagtggcattacctatacccgtaacgttgcacaaccactgatcaccattgtcaccaaaaacggttttccacttagttgtcaacggatctttcctatgcgtaatggtaaaattactaccagtcgtcgcttttagctcattacgagtattatccgcatccacatatatcaacgtcatagctaggcacgctataagtaccccccccccacaatggaatgttgccaaaccggttctttcccgttatagccatagcgttcccaggcaaaagcaaacgccgaacctaatgcagtaaaaagcgcttgcagccagaaccagcttatgtaccagccacgataacatccggtcactgtttccacaggaaaccctaccagggtagagccccgcttgttttttcctgtctatcttgtttagcaactcgtaaactgtcagtctagccacgtccgtttagatcaaaagtcacgtatactgcgacgttgtttccacccgtttccccgtcccgccgtttccgaacaacccacccgggttcagacaaccgaccaccaacagaaatatacacacagaccaccgggagttcagttaaagatttcatcaggtttattttggctgctgctagtcttttgcttcttagaaaaaaaatacccatatagagaaataatgatagtttgacaacacatatggcagggatttcttcttcatcaataagatatgcaattcccccagggagagactttcaacaattgaatttacaaaaacaaaattacatcaggagaaagagaggatacattaataaatatattatatctggtgtatatactgaatgctgctggttcataaggtaacgatgctactttttttaattccaagatggtttttctttgttagtcttttgttgacttgctggttcctaaaagttctcaaaaacgattgtgtgaagattttatgacgttggttgactagttcatgagattctgctgtacgtgtgatggttattcgctggttcgttctaagatgagtatcgtactgtgtctgcgatggtcgtctcttactggcattctctcggctgcctcttgctttcatgattgaaaaggaaaaaaggactccgagggcgcggtcatcttttacttttcggttttttcgttggcgggtcagaggtagtcagatcatgagactgtcgtggtcgatgaaactgtgtctgctcaagtgacgtccatttcttgtacggagaaaaaagtcatcgggataaataaggctatacaaggcgttgtcaagcgtgcggctctaaacaaattaagcgatacaaaattacagtaatacgaataataagttaccccctccccctgtggtccccccgagacgagagccacccatcgtgtactctcgcaccacccacgaccacagagggagacgggacgaagagacgacgcagagcgccatctccttctggaggccggcggcgttaactgctacagctgcggcggcgacaacagctgcgatttgtcggccgacatgccgatggtatgggcggcggcggcagtggccgcggcagcggggaggagaggagagagaagaggagcggggcgtccgaaggcgaggatggcatggtctcgccggagcgcccggcttttatggaacgctcgcgtccggtcgggcagcgcccacaggaagatgagtcaaaacttttaaaccatcctgagacccgagtagcggtttacaggccgcacgccagtcttagctaaaaacagcggacagtcccacgctgtttctgttgtggctctctccagtttcctcatcgccgtcccgatctccgtcgtcatcggaagaataccacccgctctcatgcggcagtcgatcgacctcgacgaacgagacgcggcgacgcctctctacggccgactggttgtggtggtgaaagaagagcaccagcaatcccaggaggagcaacaagccctcacatgtccaggaggtcggggagagggcctgtcggagatggccgtgaggcatcacgtacggcagctgaggagaaacggagaagaaaggaaaattaccgtcaggggccggggttcttattagagaaacagcacgtaggtcaggatccagatgctaatggcaatcatgatgacgatgatcatgcaggccaagacgcggcgcaccaatgccgaatccaatagccgccgtgcctccggttggtggccggcggcatctagagacatgatttgggggggaccggcggcgcgaaaagacagggagatggacagtgtcacggtgttttgttatgattaggacatggggaccggaagccgagacagagtactacagggtgttgaagggtaacgtgagggagatcatgtcatgggcgggctgaagaccgtgcggggaggattggcgtgtgcggtgcttgtggaacacggtgttttaatatgtatccgcgtgtaatgcacgcggtgtgctttttagcactcggcttgataagctacgtggccgtttgcgccgaaaacacggttaccaccaactgtctcgtgaaaacagaaaatacccacctaacatgtaagtgcaatccgaatagcacatctaccaatggcagcaagtgccacgcgatgtgcaaatgccgggtcacagaacccattaccatgctaggcgcatactcggcctggggcgcgggctcgttcgtggccacgctgatagtcctgctggtggtcttcttcgtaatttacgcgcgcgaggaggagaaaaacaacacgggcaccgaggtagatcaatgtctggcctatcggagcctgacacgcaaaaagctggaacaacacgcggctaaaaagcagaacatctacgaacggattccataccggccctccagacagaacgacaactccccgttgatcgaaccgacgggcacagacgacgaagaggacgaggacgacgacgtctgataaggaaggcgagaacgtgttttgcaccatgcagacctacagcacccccctcacgcttgtcatagtcacgtcgctgtttttgttcacaactcagggaaatttatcgaacgccgtcgaaccaaccaaaaaacccctaaagctcgccaactaccgtgccacctgcgaggaccgtacacgcacgctggttaccaggcttaacactagtcatcacagcgtagtctggcaacgttatgatatctacagcagatacatgcgtcgtatgccgccactttgcatcattacagacgcctataaagaaaccacgcatcagggtggcgcaactttcacgtgcacgcgccaaaatctcacgctgtacaatcttacgattaaagatacgggagtctatcttctacaggatcagtgtaccggcgatgtcgaggctttctacctcatcatccacccacgtagcttctgccgagctttggaaacgcgtcgatgcttttatccgggaccagggagagttgtggttacggattcccaagaggcagaccgagcaattatctcggatttaaaacgccagtggtccggcctctcactccattgcgcctgggtttcgggactgatgatctttgttggcgcactggtcatctgcttcctgcgatcacaacgaatcggggaacaggacgctgaacagctgcggacggacctggatacggaacctttgttgttgacggtggacggagatttggaataaaagatgcgcgtcaaccgtcaaagacgcaacaaccttacgtaccgacaaacggtatatgtaattctgaccttctacattgtacataggggcatatgtaacagcaccgataccaacaattctacatctacttcaaatagcaccgtctctgatactaatgtatattctactccaaatcctcccagtgtatcttctacaactcttgatacatctaccgactcacagatatcaatcgcctcaaacaccatatccagcactacaaatacattgaccgcatattctataactacgttaaacacctcgacttcatcttcaactcttactgctgtctctagtacccatacaagatcctcaatactctccaacaacgcatcatacaccacatcattggataatacaactacagacataacgtccagcgaaagttcaatcaacgtgtcgacagtttacaacaccacgtacattcctgtaacatcgcttgctattaattgtactgctacaattaacggaacaaataattctagttcaaaaacttgccaacaagacattgaaacaatacctgtgaaatcaactccactaacggcagaagaaggaacaaatattacaatacatggcaatgacacgtgggattgtcccgacgtggtttggtatcgacattataattggtctacacatggacaccacatttatcccaatacacattacaaaactttgatacatcgacgcaagatcctaacgtcacatcctatatgttattctgatcgctcatcacctaccgcgtatcatgatctatgccgttcatgtaataaaacagaactacgcctttacgatttaaacaccaccaattctggtagatatagccgacggtgttacaaacagtaccatcaccagggaccacacgaggatgaaaatttcggactaactgtaaatcccaggaacaacactgacaattataccatcccagtatgtcccagatacgtagaaacacaatcacaggaagatgaacaagacgacgattatacactaagcactaccataaataataatcttatgcgcaaaacaggtcactatgacatctcacatggcacgcacactacatgggctcttatactaatttgcatagcctgcatgcttcttttttttgttcgacgagccctcaataaaaaatatcgtccactacgagatgatattagtgaatctagccttgttgtgcaatatcatcctgaacatgaagactaacgtttccggacatgcaacacataaaattaagtaacatatctaccatgaagtacagcaaatatctactaatgtctatccatccaacagtgataccatgcactggcatcttgcgattacatggacggtaatcatatccacgttttcggaatgttgtaaccaaacttgtccgtgttcctgcgtttgtgtcaattctacaacagtcaacatatccacaaatgaaacaacgtctaaagccatcactccaactgctacgacaaataccgcaaaaacaacgtcaagccttgttattactacaccgtcatcagtaacgattagcaaagccgtgtctactgcagcttcatcaaccatactatctcaaaccaatcgcagtcatacaagtaatgtcatcacaaccccaaaaacgcggtttgaatataatatcacgggatatgttggccaagaagtgactttcaacttcagtggatcattttggagctacattgaatggttccggtacagttctccaggctggctttattcctcggaaccaatatgcaccgttaccaacagttatcatcatactttccctcgtggtaccttatgtttcgattgtaacatgacaaaatttgttatttacgatctaacgttaaacgattctggaaagtacgttgtcaagagaacacgtcatgacaatcaatacgaagaagcatgctacaatctcacggtaatttatgccaacacgacagccatagttaccaacaggacgtgtgatagaagacaaacaaaaaatacagacactactaaccatggaatcgggaaacatattattgaaactattaaaaaagccaacattcccctggggattcatgctgtgtgggcgggcatagtggtatcagtggcactcatagcactatatatgggtaaccgtcgtaggcccaggaaaccgcgttataccagacttcctaaatacgacccggatgagttttggactaaaacctgatatgcacatcaataaacttttttgtatctttagttattaatgtctgtgtgtttattcagaataactcatttataatataagacggaatattcatatacattaaaaacatgggtgtacaatataacactaaactgttattagccgtattagcaattatcccagctggcattctagtacaggcaatttcacatgagcaaaaaacatcctaccggcaacttttgctgcaaagtgaacgtgtgcaaatacccatcacaacagtcgagggagatacaatttgctttaacgttagtaacaacccctgcaacttttccagttattggaatcacaataattgtgaactttgcggttggacaccgtttttctttgaatatgctggatatactgaaaacacgtcgtgtcacccacgatttacctgtattcatgatactaaaggtctaaaactatacaatgtaaccatgaatgactcgggaatttatacacaacacgtttatcactgtgatattccatgtaacatcagcgatgatcgtaaatataacgtagatgacattgataactgcaacgctactataaatgtaaccgactatattattaccgtgttgtcttcacgttattctaaacgcaccgattaccacgtagatacttacattggttatgcaaccactgtggtgacaatagtatttatctgtgttttaacttgcattaacgtctcagcaactctaaggcacagactacgaactagaaacaacgttaacagcataacgtgattacaaagtatcaacgctagtttatccaagagaaactttcatgaaggatcgcaataaagcattgctatgtatcatctttattttaatcatgtacctcatttatatttattttaaacgtcgttgtattcctactccgtccccagacaaagcggatctgcgagtggaatttccctcattacccccgtgtgtcggcatacagtgcgctgcataagaacacgcatgacacatagcgtacctctggacggtacagtatatgataacatgattcaaggaaagtatggattcctaccgacatgttatgacagaacacacaggttttctgcgtgttttataaaagagcgtctcgaagcagcttgagccacactacggtccagataacgagcgttgcaaaaaatatgccgcgcagtagtcgaaagccgtactgagcgtgcgaagcgggtagggtgccgaacgacggatatgcgccgttgtcatcttcgactataaggatcgcgaccgagtcttcgggcatggtaaaagccacacggtgtggttgatatgtagcgtatccggtttggaatcgttcggctccggctcaggggatagtgaggaattctcaggggacgatatgggacccaatgactggataaaagaagggtttttcccagtaagatgatccccgtatcacatgaggtctggatatatataaatgaggagtgaaataggcaaagggtatcagacaccagcctcgtcatgcagccgttggttctctcagcggaggaactatcgtctctgctaatttgcaaatacatcccaccttaagcgacgagtccataaagcaccgttgtccgggtacggtgaaagtgacccggattgtagcacgtcccttttttgtttttgcatcgtttatcgtcaccactagtgcaatattttgatcgtaaggctgaaagagtattgttatgatgcttagaacgtggagattattacagatggtactgcttgccacgtactgttattatgtttttgcgaattgttcaatcagcacgacgactgctcctgtggaatggaagtctcccaaccgtcagattcccaagaatattacctgcgctaattactcagggaccgtcggcggtaacgttacttttcagggtctcaagaataaaacggaagactttttatcttggctactcgggtctggctataagtccatttgctcgttcttcccacaactccctggtgattctaatgagcagcattacagatatgaagtaaccaacctcacgtacaattgtacctatgaccgcctaacgttactgaatctgacaatggaaaacagcaggaattactatttcagaagagaagatgcgaattccaccttctactactcttgttacaatctgaccgtgtcctagagaacgcacgtgaagttccacagagccgcgtggctgtagctattgtttacgttgcttttgaaatgttaagcgtccctacggcgctaacatgtttctaggctactctgactgtgtagatcccggctttgctgtatatcgtgtatctagatcacgcttgaagctcgtgttgtcttttgtgtggttggtcggtttgcgtctccatgattgtgccacgttcgaatcctgctgttacgacatcaccgaggcggagagtaacaaggctatatcaagggacgaagcagtattcacctccagcgtgagcacccgcacaccgtccctggcgatcgcgccgcctcctgaccgatcgatgctgttatcacgggaggaagaactcgttccgtggagtcgtctcatcatcactaagcagttctacggaggcctgattttccacaccacctgggttaccggcttcgttttgctaggactcttgacgcttttcgccagcctgtttcgtgtgccgcaatccatctgtcgtttctgcatagaccgtctccgggacatcgcccgtcctttgaaataccgctatcaacgtctcgtcgccaccgtgtagctagttagccagctgtgtatagtttgttgtgttttgcttttgcgtatttgttttcagtcagagagtctgaaacggggtgggagggacttttgcgggtaatgcatgctaaaataaacgggtgggctggggtgtgcttggtaactcactgtttgaatacgcgctcacgcacatatgtagcactcaacatgttagcttttgcccgcacgccccggggcgtgccgagctgcctttttaataaagtctgggtttccagatacgcgctggttctgattttgatgatttgtgcctctgaaagctctacgagctgggccgtgacatccaatcgactgcctaactgtagcacggtaactacaacagcgggtcaagacgctgaattgcacggtccggcaccgttaagctgtaatgtgacccagtggggacgttacgagaatgaaagcacacccgtattatggtgcactttatggggatcacgcatgcgagtctcattaggacaccgtgtagcgtttggctgttcttggaaaacattttttatttataacgtttctgaaagtagcggtggcacttactatcaaaaaggttacaactgcaccgacaaacatataacactatcttgtttcaacctaacggtggttcctcgagcggttcaaagcacaaccaccgtaatgacacccacggtggttacaaactccacattcagtgtgtcacttattgcgttgagactgacgacaaattccagcgcggttggacacgctagttatcaacgacaacagcgtgttgaaaacgggacgttatccaagaacataactaacttggcattcacctatggcagctggggcgttgcgatgctgctgtttgccgccgtgatggtgctcgttgatttgggtttgcctcaatcggcttggcgacgctggcaaagccacgtggacgatgaagaacgtggtttgttaatataggaagtaaaaggcactgttttagcatgactgtttccaaaccgtaacgtggtaaataaatcatggcttccgacgtgggttctcatcctctgacagttacacgattccgctgcagagtgcatcatgtgtacaataaactgttgattttagctttgtttgcccccgtgattctggaatccgtcatctacgtgtccgggccacagggagggaacgttaccctgatatccaacttcacttcaaacatcagcgtacggtggtttcgctgggacggcaacgatagccatctcatttgcttttacaaacgtggagagggtctttctacgccctatgtgggtttaagcttaagttgtgcggctaaccagatcaccatcttcaacctcacgttaaacgactccggtcgttacggagcagaaggttttacgagaagcggcgaaaatgaaacgtttctgtggtataatttgaccgtgaaacccaaacctttggaaactactccagctagtaacgtaacaaccatcgtcacgacgacatcgacggtgaccggcgcgaaaagtaacgttacggggaacgccagtttagcaccacaactacgtgccgtcgctggattctccaatcagacgcctttggaaaacaacacgcacatggccttggtaggtgttgtcgtgtttctagccctaatagttgtttgtattatggggtggtggaagttgttgtgtagtaaaccagagttatagtaatgtgttttttatcagggagaaggttttgtaccaacaatgactacatcggggctatctgtgtcggaaaattatgacggaaattatggactcacggaaaccgccaatacaacgcgtacaaatagcagtgactgggtaacgttaggaaccagtacgccactgttgggaagcacggagactgcgatcaatttcggcaacgcaactacggttattccacaacctgtggaacacccggctggagaagtacagtaccaaagaacgacaacgcattactcttggatgctgattatcgttatcattttcatcatttttattatcatctgtctacgagcacctcgaaaagtttatgatcgttggaaagacagcagagagtacggacaagtgtttatgacggatacagaactgtaatatactatgatgtctaagaagtgtttgcggttatttccatggatgacaattttgttttgcataccaaaagcacaacattggaactatatgacaataccatgcgttcttaaaattggacgcggcggtcaaaatatgagtttgcctccccttaacaattcattgtacggaaacgatatttttcaatggtatacagacagaccgacagtcaccaacacgttatgtctttatcaaaacaatgagtactacacacaatccaatgaagatatttcaaacatcaaatggcaatgtacaaaaaaccatacgttaattcttattaacctaaccgcaacatatagtaggaactattactttcaatctcttaaaactcttgggcaaggaataccgagaccgagcagcttatgttataatgttagtgtacaccttacccaccaaacacattgtcatacaaccacattatccctgtatccacctacacctgtacacaattcattaacaatatcaccgtcattagcttcaaccaactttacacatgttgcggtccatcatgccgcaggtaacgttgaagcacaacacaacactgccactccacatacaacgtggatcatacccctggttatcattataacaatcatcattttaatttgtttcaaatttccccagaaagcttggaataaattcacacaataccgatacaacagtatgctcgccgccgcttaaagaatcaccgtcgaggaaactaaaagctatgtacgtttatttttcagctcactgtttgaataccgtaaacataatgacgtacatatacgtggttatacaacaggtgtttgtgttatgcggcgactgattaaccatatcgtgaaccatgatcttttccgatggtctgtcgtgaccgcaatgatattttacaagtattccgaaacctgtatggaggtcactgtcagagtaggtgatccagttaccctcggtagtggacatggttatcatccaggacaaaaagtacactggtataaccagtcatgcgtcggcatcagcaacggcgaaaatacgcatcctatctgcacctacgaccctcctaaacctggtagacaaaagacaatgaaaaccactccgttgccatcaccactgttgtatgaatgtcacaattccacattaagcattcttcatgtaaacgtctcagatcccagaaactattgcaggcgaaaatgtccaccaaagggtaactgtgagtttcccacatgttttacattatcgctgatttctagaacgacaaccaccagaagacccggacaaaaaactacgctgtcgcgattaaaaactacgccaaataaacatacgcagcacaaaagatccacgcgaagaacgtcacttaaagattacaatgtaacgggtctgccgaaaggctttgcggactcgtttaccggtaacgtagaggcacatagagccaaagatgccgcacacagcgcatggattctcattgtcatcatcattatcatagtcgtcattctgtttttcttcaagattcctcaaagactccgagagaaatgggacaccaagggatacctttacaaagggaccgatggcctgcccactacggactaattatcgtgagcggacggatatgtccggtttcaaactcactgtttgaatatagggacagtccctacggaacctgagaacatgtggaaatcacctgtggtagaatgctgctcaggtacattacctttcatcgcgaaaaggtactttacctaacggctgcatgcatctttggtgtctacatcagcctccatgatgcctgcataccggtggttggcaagataggtaccaacgttacgttgaacgcggtagatgttctttcccctcgcgatcaagttcgttggtcatacggtccaggcgggcaaggctacatgttatgcattttcactggcacatcaacaacaacgtttaacagcacgcgctttaatttttcatgtctgagtaattacagcctcctcctcattaacgttaccgcgcagtatagtactacctatcgtactatgacatcgctagacgattggcgtcaccaaaaacataaccatggttttcgatggactttagacacatgttacaatctgacagtgaacgaaaacggtacattccccactaccaccaccaaaaagcccactacgactacgagaacgacaactaccacaacacaaaaaacaaccaccacgagaacaaccaccaccgccaagaagacgacgataagcactacccatcataaacactccagtcccaaaaaatccaccacccctaacagtcacgtagaacatcacgttggttttgaagccacagcagcggaaacaccgttacaaccaagcccacagcaccaacacgtggctacacacgccctctgggttttagcggtcgtaatcgttattatcatcattatcattttctactttcgaataccgcaaaagctgtggctgctctggcagcatgacaagcacggcatcgtgctcatcccccaaaccgatctgtgagcaagtcgcgtaggaaacgattgcatgaaatcactgtgaaacgccaactccgtgccaactggcacggcggacaggcctttgacgtatttgaagccaggcgcgctcttgataccgaaaggatccgagggggctttccaaagccgacgtccctgattcccttcataaagctgttgaccggccctagaaagaccaagagcatgctgtgggcccactgcggtcgcttcttgcgttatcatctgctcccgctgctgctgtgtagactgccattcttactcctttttcagcggccgcagtgggcccacggcttggacattgtcgaggaggacgagtggctacgggagatacaaggagcgacgtaccagctgtccatagtgcgccaagctatgcagcacgccggattccaagtcagagcggcgtcggtcatgacacggcgaaacgccgttgacctggaccgaccgccgctttggtcgggatcgctcccgcatttgcccgtctacgatgtgcgttccccgcggccgttgagaccgccgtcatcacagcatcacgccgtatcacccgaactgccgtcgcgaaacgggatacgttggcagtaccaagagttgcagtatatggtggaagaacaacggcggcgaaatcagtcgcgtaatgcgattccgagaccctcgttcccccccccggatccaccatcgcagccggcagaggatgcacgagacgcggacgcagaacgtgccgaatcaccacatagtgcagaaagcaccgtcaggcacgacgcgagtgagaacgcagtgcggcaacggcgcgaaagacggcgctataacgctctgacggtccgcagccgggactcgctgctcctgacgcgaatacgcttctccaaccaacggtgtttcggacgcgggcgtttgagacatcccgcgggaagtggtcccaacaccggcggaccgcgacccggcggtgcgggactccgtcaactacgccaacaactgacggtccgctggcagctgttccgcctacggtgccacggttggacacagcaagtctctagccagatcagaacccgctgggaggaaagcaacgtcgtgagccagacggccacgcgagtacgtacgtggtttgtggaaagaaccacgttttggcgtcgcacgtggattccgggacagaacccggcggccgaagcgcaagaactggccgtcataccgctggcacccacggtgctccagcagaacgaggaaccacgtcaacagcttacgggagaggagacaagaaattcaacgcacactcaacgtgaagaagtggaggacgtttcgagagaggacgcgagagaagggaatgatgggagccgagcaagtggaaacgacgagagaaggaataatgcgggaagatatgatgatcacgaggttcaagagccgcaggtcacttatccagcgggacaaggagaactgaacaggaggtcacaggaggagaacgaggaaggtggaccgtgtgaatcgccgccaatgacgacaaatacgctgaccgtggcctgtccgccccgcgaacccccgcatcgtgccctgtttcgtctatgcttaggactgtgggtctcgagctacctggttcgacggcccatgacgatttagaatacaccgagccattcctttatttcccccccccccatccccggtcgcttatgcgtgtcaaacactaccaataaagataatctgccaatagcaccttatatataatatgtggtcgcgtgtggtctttttaaggagccctgaaacacagacaggtatgggcggtggccggctgccgccgctgtggctgccgctactgatcgcctggagcgagtggggcaactgctgcctcgatgcgcctccggtggtgcgttcgccctgtctgcagccggtgcgcgaccgcaaccgcgagcggaacccgggctcaccgcagttgctgccttacggcgaccgtctggaggtggcctgcatcttccccgcgcacgactggccagaggtctctatccgagtccacctctgctactggcccgagatcgtgcgttcgctggtggtggacgcacgcagcggtcaggtgttacacaacgacgccagctgttacatcgccggcgggcgctggcgttttgaggacggcggcgcggcgcagcggctgagcctctcgtttcgtctcatcaccgagaccgcgggcacctacacctgcgtgctgggcaacgagacccacagcctggcgaccgagaccacggcgctggtggccgacgtgcacgacctgcgccactcggaccgctcctgcgacctggctttcggatcgcgctcacagacgcggtacctgtggacgcccgatccctccaggttgcgcagtataaactgcggttgggagggtgaacggcaccgcgtagtccactacatccccggcacctcgggtctgctgccctcgtgcgaggaggacgagcgcgaactgtgcgtgcccttcatcagccatagcatcgccgacaacaactgcagccgccggcatcgagtagacggcgctaggcggcgctatcatctgcggagggattactggctgacggatccgaagatcgggctgctggccgcgggatcggtggccctgacctccctctgccacctgctgtgctactggtgttccgaatcgtaccggcgcctgaacaccgaagaggaaaacgaggcggcggaggaaactgccgcgggagaagcctctgcggtagcggcggcggccgtctctgaggaagagcagcagcgggagtaaacggggagagccatgaagcggatgattcgcagtcacggcaggaaaacggaatgtcagatgacgggcgccggcgagcgacgcggctccgccgtcggtgcgctcatctgcgacagcggtacccgacgcggcagcggcgccaacgaacgccgcgactccgacgtcggtcccatcgcccacagtagcggtaccagacgcggttcggcaaatgaaacgtccgcctgtacgcggaccgatcaccagaaggcggacattgggctgtggttcatgtttctgttttttggactgtgttcgtggttagcgatgcggtatcgcgcacaataaattttgaatccatatcaaggaacgcgtgttttgtattttattgggaatattggcggggataaaccggtttcggatgtttacccttaatcttaccggggacctcgttgtcctctcccccttcttcctcggacaccgggcttcatgctgacgtaggtaccgactggggtcaaaagcctgggtacttatggggagcgcgcacaaaggaccgtcaggcgccggcatggagcgtcgccgaggtacggtaccgctgggatgggtgttttttattctttgcttatctgcctcttccccgtgtgctgttgacctgggtagcaagtcctcaaactctacctgccgcttgaatgtgacggagttggcctcgatccgtcctggggaaacgtggacgttacacggaatgtgtatctctatctgctactacgagaatgtgaccgaggacgagatcatcggcgtggcttttacttggcagcataacgagtctgtggttgacctgtggttgtaccagaacgatacggtgatccgcaatttcagcgacatcaccaccaacatcttgcaagacggactgaaaatgcgaaccgtccctgtgactaaactgtacaccagccgcatggtcactaatcttaccgtgggccgttatgactgtttacgctgcgagaacggtacgatgaaaataatcgagcgcctccacgtccgattgggctcgctatatccgagaccgcccggatccgggctcgccaaacacccctccgtaagagccgacgaggaactgtccgcgaccttggcgagagacatcgtgttggtctcggccatcactctgttcttcttcttgctggccctacggatcccccagcgactgtgtcagcggctgcgcattcgcctgccgcatcgataccagcggttacgcaccgaggactgaacggataaccgcaaaggccacgtgcaacgttcacgctgctataagaaggccatgtcccccgtggacgggtctctttgacacgagcgcggcacgccgttgccacgagcatggatcacgcgctcctcacacacttcgtcggccggccccgtcactgtcggttggaaatgttgattctggacgaacaggtgtctaagagatcctgggacaccacggtttaccacaggcgccgcaaacatctacctcgacgtcgcgctccgtgcggcccccagaggcccgccgagattcccaaaagaagaaaaaaggcggccgtccttctgttttggcacgatttgtgctggctgtttcgacgacttttctttcctcgggaggactcggagccactgatgtcggatccggcacggtctcccgaagaggaggagtaaacaacacacggctaagaggatacatcatcaaagaagataggaggggtcaaaacgcggactgaaagtatataacgccgatcatgtccgaggaactgttaataaaacgccatgatgacaatgtggtgtctgacgttgtttgtgctgtggatgttgagagtggtgggaatgcacgtgttgcgttacgggtacacggggattttcgatgatacatcgcatatgacgttgaccgttgtggggatttttgacgggcaacacttttttacctatcacgttaattccagcgataaagcgtcaagtcgggccaacggtaccatttcttggatggctaacgtctcggcggcctaccccacctacctggacggggaaagagccaaaggtgaccttatttttaaccaaaccgagcaaaacctgttagagctggaaattgcgttgggttaccggtcacagagcgtgctgacgtggacgcacgagtgtaataccacggaaaacggtagttttgtagccggttacgagggatttgggtgggacggggaaactttaatggagctcaaggataacctgacactatggacgggccccaattacgaaattagttggttgaagcaaaacaaaacgtacatcgacggtaaaattaaaaacatcagcgagggggatactacaatacaaaggaactatctcaagggtaattgcactcaatggtccgtcatttatagcgggtttcaaacccccgtcacccacccagtggtaaagggcggtgtccgaaaccagaatgacaacagagctgaagcattctgtacatcttacgggttctttccaggggaaattaatattacttttatccattacggtaataaggcgcccgatgatagcgagcctcaatgcaatccgctacttcccaccttcgatgggactttccatcagggatgttacgtagccatcttttgcaatcaaaactacacctgccgcgttacacacggtaattggacggtggaaatccccatcagcgttacctcacctgacgacagttcctcgggggaggtccctgatcacccgacagctaacaaacgctataacaccatgaccatcagcagtgtcctcctagccctgcttttatgcgctttgctattcgcgttcctgcactactttaccaccttgaaacaatacctacgtaacctggcctttgcgtggcgctatcgcaaggtccggtcgtcatgaccagcaacgccctgtatgagctgtttcgacgtcggttaccgcgtgcccccgtcaacacggtcatgtttctcacgcgacgcactcgtgatgggttctgcggtcggttgacgtccatcgccacgaattcccactacactatgttcgtgttagatcacggatccgtgcgcatcgagcgaccgagtcagtcagaagtggattgcgccagtttaatggaaacgctgaagcggattcggttacgaaattcgtgggtagcgtcagaagacgagctagatgtgagtcgcagggacgcgtgacacgaaacgcgttcaggattaacgtaggttttcgaaataacctacgtccgtgagtgacgcggtttcgtgttgaaacccgcgcccgcttctcacggtggtttatgatgaaaccggcgttgcggatccacgcgggttcctcattcaacctgcgaaaagaggaagttgcggtaaaaccacgtcaataaagacgtcaatgacacctcaatgttgcgttggaacggtctttatatatacaaacgccgttatgatcagtgtccggcaagatgctcgggatacgggctatgctggtgatgctggattactactggatacagttgataacgaacaatggcactcgaagcaacaataccgataccatctttgtatctctccttaccgggcccaacggagttactcgcacagccatcggaggtctgtattcaaactacaccaacttaactggagcatttggcttcacttcaacaaatatgtcagcaaccaactcttccgctgaggataattggagcgtaaccaacctgacggagagttgcatcaaccgcggtgagtcctatgtgactaccatctggcttctggactgcactaaaaacgatacttattggtactatggaaatgcctacaatcatacatgtgaaggtacaatttcgggatatctcctgggcatgtgcaagctatggaaaagttgggtcaataatattacttcttataacactgtcagagtcgaatcgctgggaaatgaaacacggtgcatgctgctccctagacagtatactctcaacgccacggtggaatggtacaacaaatctgaaggtgacgtaccagaagaattcatggactatgttatcctgacccccttggctgtgcttacatgcggactgcaggaagcttatatactcgacaaaggtcgtagatacatgtatttgttttccgtgtcctgcgtgggaatcacaggtaccgtatctattatactcgtctccctatcgctgctcatcctcatctgttactatcgctgtggccggcttctgatatgcccacgcggctttgaactcttgccagaattcactgaggaagaggaggaaaaagaaaaattgttaacgcataatgacattgaagtccaagtgcctattcgcacgcggcgactactcgtcccttggatccgggagagcaaaatgtgggtactaccacccccgttgcctccacgacctccccacttaatagaattcccgccgtctcctccgtcatcgcctgggcccatgcacatggtggtctgcatgccagcatgacgaactttggactctgagccccaagcggtacgaactacatattttccataaatctacactgaacttgagcacaaagatactgacaatagactggatatacagacttttatatgatccctgtacagatgtaaataaaatgcttttatttaaaactggtcccaatgttcttcgggaatcatggggtggggacgggggacgcggtagggagcaaaaccgggtacatgggggggaacatcgtccaacagtagcaccagcggattgggtaggggttgctgcggaggtcggtcgatgacgatgtcgatctccatcggcagatccggcaacatctcttcatctccctcaccgaccagcactcggcgctgttctggatgtatatgattctggaaaagcctccgacgagctcgcggcgcgtagaaagccaagcggcgcaagggccggcgagcccgaaagtccatgcgcacagatggcatgagtccttgagtgacggtggtgagctggggaacagggctacctcccatcgcgacggtgacagtggatccatgagagaggcgccgcacgctgcatggctaaataccgtgaatcccctgacgtcgtctttcgtcccgaacgcgtcatgttgggggcgaggcgtaaaccgtcgaggttgaaaaaccgcgtatctgcgacccgtccggactacgttgttttttagaagcggccacatgacctcgagatgtcgtcacccaaggtatttaacggcacacagccagacgcgttcgtcagcagcgacgccgacaagacctcagcatggctcggaggctatggatcttgagcttactagccgtgaccttgacggtggctttggcggcaccttctcagaaatcgaagcgcaggtaaacggaatctggggaattcaacacaggtaagaaatataaaaaaataacgtgattgtgaacgcggttatcgtgtttttgcagcgtgacggtggaacaacccagtaccagcactaactccgatggtaataccacccccagcaagaacgtaactctcagtcagggggggtccaccaccgacggagatgaagattactccgggggagactatgacgttttgattacggatacagatggaggtaaccatcagcaaccacaagagaagaccgacgaacacaagggagaacacaccaaagaaaatgaaaagacccagtagcagcagcagatcccaagggttaaagaccatgttgactattttgttttttattaaaaagctgtaaggttttgctctaaaaacaccccgcctccggtcttttttcttttgtattcggcacgcgaaacacggtttcttcccatagcctgtctaactagccttcccgtgagagtttatgaacatgtatctcaccagaatgctagtttgtagaggctatgcgggatgctgcggcggcgcgaccttccctctccacccagccccgtcaaaacacacgcgactcgagcggttcgtatgaaaaataaaaaacagctttttatttacaggaacggggaaaaaaaaggcacacggtccgtgggagacgcgggttcacgcgtcgtcaaaaagttggtggtccactccgtaaggacaggtaggcttatttagcttccgcatgctcctggttccgtaataaatgccgttttcgtggcagcgtgtcatgccgcgagtcacaaactccatcaaactgtcggccacgatgcaaacgtgctgattgttggcagcaaagacgcgcatacagtcgtccacgaagaggttgatcacgtcgtaggggctcaccaaccagcctaaaggttccacgtggttactgccgaccatgaccctccagtcgttaatctcgctccagtcgtacagccgaatcgtggagacgcgaatgacgctgtaatcacccatgaccatgagtcggccgcgatacgtagcacgccactgcgcgaacgcgtggatgtgcatgcagccggccagcgctctaagcgaggcggtgtgcggcagctcctctgggacggtgatgaagttgcagcgtcgcaaaccgatgttgagaaattcagtgatgctctcggccacaaaggtcaacgagtcagagtagatgtggtcggtccacaggtacatggcgcccgaggcgcccaggtacagttcagacggcacgttgtgatcgcccttgtgtttaagaaagttgtaggtgcagatgctgccgacgaaacgcagcggctcggggcagcagaggtagctggccagacgctgtgcatcccgtccttcgtcgcgcaccaagcgccagcgacgccggataacgaggcagcggtctttgggccagaccagggccacgcgttgcccgggtttccacggtcgcgacgtcttaggaggcctccagcggtcgagcagattgagaaaacagtccttgattaccgacatcgcggtcgcgcgtcggtggacaaaaagaaatcgggccgatccagaaaaaaaaaaaacgacagcgaaacaccgccgtgctcgagcgaagggtggcggagggccagaagaggcggccttgacgacgttggcagcgaaaaaattggcacgcgagtcaaacgggaagtagcgtcggtgttttatgccccaagcagcgtcgtcgtcactcgtggcgtcacagtcaacggtgctgacgtcctttggggcagtcgggcacgcgatcgtagatgccgttgtggccgctgaaacgtcggttttcaaacagcaggttaagtcccagacacatgaacgtgttcagattatctcccacccggatgtagcggtcgtcgcgcacgtcgcaggcgtagacggccccggtataggcgacgacgatggggataaggtcgacgggccagcgcaggtgaggaaagggcgcgttctcgcccttgaggctgacggttcccaggccgagaacgcgcattccgaaagcggttttgatgttgcgcagcaagtgaccgccttccacgctgttttcgaaacacctgaggttgcatagacgcagttccgttcccggcgggaacgtcaatggcatgaactgcccgtggtggcggatgatgaatcgtgccatggtatccaaaccgaggctccaggcgcgcaacagcgggcgaaagtagcgcttaaccaacgacgaggtcaggtagcgcatgcagtgcagggtttcgacggcgcgcagcccgacgcgcgcaaactccatgaggttgcgggccaggtagtagacggcggtgtcctcgcgtacatagcaaaagacatagccctcgtccgagatgaggcacacggcggtcttcttctgctgatccggcgacaacacggcctcgttcacgaagcgacccacgaaggccaggcgcgtctcgcagcacaggtagtgactccaagctttcacgtcctccggtttgaagtcctcgtccgtctcgatctcctgcagcactaggttccagcccggcggccagaccacgggcaacacctggcctgcgttgatgcgcacgtaagcttccagacagcccaggccgaactcggccgtgagcgccaggctagccagatcgctcatgtgacgcgccgagtcggtgggcgagcccgggggcccgtcgcacaccacgctccgtcttcttgtcctcaccgcggccagcgtggcgaggacactttccgcgcccgaggctgtatcttcggtttgcccgccggagccggccctcactatataacgtcccgcccgggtctcctccatgtatgcaggtaagcaactgagccgaacgcacctcagcagacgagaggatgtcgtcgcggcgtcgcagctcgtcacgtcgctctggcgaaccctcgacggtgatttatatcccctcgagcaacgaggacacgccggcggatgaggaggcggaggacagcgttttcacgagcacgcgggcgcgcagcgccacggaagatctggatcgcatggaggccggtttgtcgccctacagcgtctcctcggacgctccgtcgtccttcgagctcgtgcgcgagaccggcggcaccggcgccgccaagaaaccgagcgaaaagaaacgatcgtcgtcacgtcggcaaccgcagatcgcagcgggcgcgcctcggggctcgccggcgacacccaaggccggcaagtcgcctaaagtctcgcgaccgcctagtgtgccctcgctgcccgagaacggcgccggcggcggtggcgacgataacagcagcagcggcggtagcagcagtcgcaccaccagtaacagtagcagaagcaccagtcccgtggcgccaggtgagccgtccgctgccgagggcgatgagttttccttctgtgacagcgacatcgaagactttgagcgcgaatgttaccgggtcagcgtggccgacaatctgggcttcgagcccagcgtggtcgcgccgcagcacgtcgagtatctcaaattcgtgctgcaagactttgacgtgcagcacctccgccgcctcaacgaatgcatacccatgccggccttcgcgctcaccagcctcgtcgaccccgtcttaaacaacgtagcgcctggcgagcgcgatctcacgcgtcggataatcacgcacgcggtgatcatcaactattactacgtggcgcaaaagaaagcgcgccacatggtggaggccatacggaccaccgtgcgggacgacacggtacgccgggtagccgcgcaggtcaacaaccagagccgttcggggcgtgcggccgcgctagcgcttcactttctcacgtcacgaaaaggagtgacggacggtcagtacgccacgtctctgcggcggctggacgaagagctgcggcatcgcggcacgcccgaatcgccgcggctcaccgaggtctaccagacgctacgcgattacaacgtgctcttctataccgcccactacacctcgcgcggcgcgctctacctctatcggcaaaacctgcagcggctcaacgaaaaccaccggggcatgctccggctgctttcggtcgaagagatatgcgaagagcacacgctcaacgatctggcgttcctagtaggcgtcgagcttatgatcacgcactttcaacgcaccattcgcgtgctgcgctgctatctccagcaccagctgcagagcatctcggagctgtgttacctcatctatgtacaactgccgtcgctgcgcgaagactacgcgcagcttagtgacgtgctctactgggccgtcagtcaaaactacgactacgcgctctacgcgagcacgccggcgttgtttgactttttacgcgtcgtgcgtcagcaggacgccttcatttgcaccgactacgtgtactgcgccctgcgtctgctggcctgtcccgacagacctattatcggtgacaccggcggcagcagtagctcccaacgcctcgtaggcgagtttatggtgcgcgatccgctgttgcgcgacccgcgcgccacccacctgcgccagaaactcatcacccgcgacatatgcgtggcgcggttgcaagcgcagccctcgagtcgacacattccggtcgaacacacgggtgtctcctccgtcaccctgctcaagatctttagccaggtcccccccgacgaacgcgaagaagacacgttacgcgagatggctcttaaagcgtttatggaagcgaacggtaatcaccccgaacaaatctgccgatccccaccacccccgctgccaccgcgcgactatcctcaacgcgacgagcgggaccgtcaccgtcgcgaccgccgcgacagcggggaatactgttgctgatggtgggacgaaacagcagggcggaacagtttatgatagaaagtcacaggaaagtatgtgttgttttttttttaatgtaccaagaataaaaagtgcgtctacgaccaaagcggtgtgtggacgctcgtcctctgtcttctccggtttttttttatgtgtgtgtttttcttttccttcctattttgttacggcaacagcgctgatggcacgttgccggcttcgaacatcgcgtcggtgatttcttgcttgcccggcgtcacacggtgacgcagcagcgcgcggctcacgtagcaggccgactcgcggatgacctggccgtcggcgtcgcgtcgcaggcccgagcggttgccgtgacgcagtcggccctgcgcggcgcgctccacgtcttcaaagtagctgtgtagcaggccgcgctccagcagctgcggcagcgagtcggcggcgcgcaccacaaagttctcacggctgatctcgtagcacagcacgctgccgtcggctgccacgccggccacgctgcggtcccaactgaagaggttggcgagtccgatggtgccgatgacgcgcaactgaccctgggtcaccaccagcagcttccagtattctacgtcgcgcggggtgaggatggtctcctccacgtcgcagacaaacaacgtgtagccgcgcggatagggcagatccaggtggcgaccgcgctggcggcgcataaaatcgtctaaattcaaaccgccgtcgggtgcgcgcctgctcgtcatcgccgcgcctcgtcggtcgatgaccccacggtgcttataacgcgccgccgcggcttcatgtggcgtgacctccgacctcgtgaggccgaaaacggcgtacatgaagacgctcaaacttttgaatgtgggcccggtagcgcaccgagggccccggggcggcgacgacggcgggtccgagttccagcggggccttgcggcggcagcggttggcgtggttgctcagctcggcgtccgagagcgccgagctgaactgcggcagccgcgtgcgatcctgcggcgcgtccccgtgtcgcagcgagtgccagagcaggcgctggacgcgcgccgtctcgggcgtcggcggcgcgcgacagccccggcgcagcttgaaaacgtgcaggcacagcagctcgcgcttgatgcgcagcgacacgctgcggtagtcgggaatccgctgcaccagctcgagaaagtcgcagaaggtctccacgaacgtgtcctcggtgaagcgaatgcgcttcagatcgtggacgtgtttgcgaaaccgcgacagttctcgacgttgcacggggttctgagcgagtcccttgcgcagcagcgcagcctcgcctttaaacagcctgatgagccgctgcacgtccccgctcaacatacgtatacacgccgtgtactcgtgacgtatactggcgcgcagcagccgaatgatacgcagggccagcacggcgttggaggccaggtacatggcgtagccgcgacgcgggttggcacaggcccagcccgcggggagcagaaagtagtcgtcgaccagcgtctgcgaccagtcggcgaagcccaggtcacgtgatacgctgtcctggacgcgggccacgtcgccggctgtgaggtggcggatcgccggcaggtgaaacgcgcccaggtgtcgattgcgctccagcctcagctcggcgtgctccaaacgggaatggtgggacgccaccgcggagggcgacaaagaggagtggtcgccgccgccgtagttaccgttgtgattaccgccgtcgtcgcgcccgtcgccgcactcgcaaaaggccgcgtagaggtccttcaacgccgcttcggctcgcgccataaacgtggcgtggaaaaaaacggcggcgcggtgcgtccggtacttgacgggcaacccgcggcacagggccgccggcaggcagcggccgatgagttcgcgctcctcgggctccagaaacaggcacagggtgccgtccaggcgcaggtacagctcctcggtcatcgagcatagctgccgcaagtaatgggtgcgcgtcccaaaggtcttgtaatcgagcaacgtgcacaccacgtattgccccgtggccacggccagagcgatgcgtttggcggcgcgactgatctctggcaagtactgcgcctcgtgcaccagacggcggaaagcgccggcgttgagccagcgaaaatgctgcggatcgggcggcaagggcacgcctcgaagcgcggcccagacagcgaggtccgactcgagcgtcagaccgcggatgtcgtacttgccgtgcgccgtagcgcaggctgaatggaccagacagctgcggcgaatgtacaccatggcgtgcttgggatgtttgggcgccggcgttttctttttctgaccgccggcggccgccagatcctcgggcgtgcgacacaacaggccggcgcgcacagcctcctgtcgattacgaatcggcgtcaggtaggcgcgcaggaactggtgacaaaactcctcatcatcacgacagtcgtcgagatactcgtacgtggtgagcggatcgcgaaataggcgctcgtcaccgtcgtcatggtcttctttagcctgctcctccggctgctgggttggcggtggaggcggcggctgatccacggggttcatgactgagaggaagaagaaggtggcggcgaagcgacgcggagcgacggcggtaaagccagacaccggctatatagctagtcatcacagtctcctccttcacgacgcccccgtgccgctcacgctatccagcacgctacggcccgaaaacacgtactcgctgacgtcgtacgcgggcgatgtatggctgctcaccggtttcgcggcgacggttgcgctcgagtccaacggcgagaagcaaaaacgccgtgggcaacgaaaccagaaggagccctgacggataaaaccgcgcagcgtctcggccaacttaaccagcatcgtaccgtacagcagtacgtgaatgccgccgtgcgcgtccataaatacggctttgtttacgggttccatccatccgatgactacaaagtgagcctgttctagcacgccgatcacaaaattgttggcctcgtcggcctcggccacattccacgagccgaaagtgaaagtacaagcgggcgagccgcccaggcggattttgctaccggcgtggagctgacatacgcgcagcagattggcgcggtcgtgcagtatctgggagagttcgtacatgcccgcgaaggtgtgcttaaaccacgcgccctctacgatttcatccacgtaatcgcgctcaaagaagctatacacggcaaagaggccgttctcaaaaaactcgccgaacgagagccccagcacgtacaccttgtcctcgccgggcaggtacgcaaaggcgtgcccgtgcccggagacccagatctcgggcgccgtgtttgcgtccggcacgcattcgtacacactgacgaggccgataaagtacaagcggccagcctggcgcaggcacgagaagcgccggtaggtcttgtgatcgcgcaccaccccaaagtactgagtgtcgcccagcatgatgccgtgcagcggcggccagcacagcgggagccaacgacccgccgtggcgcgcacgtagcgctgcaggtgaaccccgctcgcacgctcgcgcggcttcgggcgcttgtgggtccaggcatcacgcagaccgcgccagatgctgctgaacttgggctgcccgcgcagatagagcgacgagagcgagtcaaagtagcccacgacgagcctgtcgggagacacaagagcgcgaaaatcaaacctagagcgacgacggtgaaaaaaccgattataagcgcgtgtctcaaacacgctactttcggttataaaaacaccgtcgccctatttctgggcgtgtgtacactgatgactcacctacgctttttgaacggcagtctcagctcgggattggcctcgtacagcgagctgcggtccacggggccgatgctctcgtagcgaaagtcgtcgatgagcagcgccagccccacgcgcacgaagcccctgaggtcgcgcgccagccgcaccaacttatcctgccccaccagcgccgcgtacacggtacccgtgtcgccgcagagaatccgcacgcggtgaaagaaggtcttgtcctcggcgccctcgatctcgcccagcggcatgacgggctcgcgcgtgtacaacgaacgttgaaagcggcgcagcatcgaggccgagagccccagatcgcgcgccgtgcgcagcaccagggaatgcttctcgggccagatgagggtcagctgcgcctcgcgatgcgcctctacgtaggcgcagcgagcggcggtgtcctcgcaagccagcaactcgcggaaagccagcagcgaacgtaggtagcggccgcgagcggaggcgcgcgagcggcggcacagctcggcccgatgatcgggatgcaccaagggcacgttgggttgcagacgcgcgcagatggattcgtgcaccgggtcgcagcggatcatgcccttggcaaaaaatccggccagatccgaggccaactcgtacaggcagtcctcttgcgcgtcgtaggcgaacacggcgccgtacgcgtccacgaacacctggtaccggcaggtggcgtgcgagaccgtgccaatgagatgcagagctcggaattcgccgaaaaagtcgttctggcagtgctccagatcgatctcggtcagcgagtgcggcgaatgctcgcccccgaccacgtagatgcactgcgagggccagcccagcgacacgcacgagccctcgaagcgccgcaagtaacgccgcaggccctcatagtcgcgtcgcacgcacaggtcggccaagtcgcgcgtgcaaaagacctcgggtaccaagcagcgtttgcgacgcggccgacgcgcgtgcccgggcagaggaggaaggcgcgacggcggcgacgacgaggaggaagacgccgtggccgccgagcagcccttgcgacggccggacatgccggcagtccgcgacgatccacaggagacaaaaaagcagaagcagcagtagcctcggcgacccgctccaccccgtcctccacacgctcagccgcgactgaacgccggggcgcgccgctacttgggtttttatagccatctgccccccgtctcgggcacccgggagcgatctacggagacctgacagcagttgggcaacacaagatagggaaatacaaagacacttttaataaaaaacgagactactttgtgtgtgtgctccgtaaactgtttattctccccctccgcttcgctctggatgggctccgggcccgtcaacacgcgactcgcgcggcaaaaggcacgctgttgacggcgcgagagcccgtcgtgatagtccatcatgccccggagatcgtgcacaaagcagctgtcgccgcgcagaaaccgacgcagcgtctccacgtgctgcagctgccggcgcgtatcaggagccgtcatcgctgatgtcgtcatcgccctgacaggcgcgtagatggctccgcgagatcacgcgcgttttcaaccgccgtgacacatcaggtccatcttgagctggcgccgggcctcgcgcaggtgtcgcacgcgttgtgagcgggaggcgagttcggcttcttgctcgaactcctgctgctcactgtccgagagggtgcgataaaaggcggcaaagtcctccaagtcggctacatgcgccctgggtctgacgctccaaagcgtacgcagtctgatgaagcggacccatcgagcgtcacggcacgccgtcttgaacgcggggcccgggaagaggttcttctccccggcgcgctcgggccggcgaggccgacgcggtttatatacaccgtctcggacggcgggacgccgagcccgcgccgcggccgctcatccggagacggcggaaaccgcggcgccggaggaaacggggaccggcaacgacggcggtggcggcgaccagattatgggggaaaaacccacgcttgtaaccctgttgaccgtcgccgtgtcgtcgccgccaccgtcgtcgccgctgccgcttgtcagcttcacggagctgctgttaccgccgccgtccgtcgccgccgccgcggtggcggcgacagcgacgagcgaggtgggcgagaaaaccgcggagcaagaggtagcggctgcgggtccggagaccgggaatgagagaagagaaaacagggagaacgaaggaggggagacgaggacgacagacaccaccgcggtcaaaaggtcgcacgacggtatccctcgccaactagcagagcgcctgcggctgtgccgccacatggaccccgagcaggactatcgtctgccggcgcaggacgtggtgacctcgtggatcgaagcgctacgcgacgcggaccgcgataactacggtcgctgcgtgcgccacgctaagattcaccgttcggcctcgcacctgacggcctacgaatcgtacttggtgtccatcaccgagcagtacaacacggcctcgaacgtgacggagaaagcttcgtacgtgcagggctgcatctttctctcgtttcccgtcatttacaacaacacgcagggctgcggctacaagtacgactggtccaacgtggtgacgcccaaggcggcgtacgccgagcttttctttctgctctgctccaccagcgagagctccgtggtgctgcaaccgctcatcaccaagggcgggctctgctcgtccatggcggtttacgacgaggaaaccatgcggcagtcgcaggcggtgcagatcggttttctgcacacacaactggtcatggtgcccttcgtgccgcacgcctgcccgcattacgccgtgcctttcacgacgccgggaaagccgggctgcggcggtgctccgagcggcgttgcggggttggaggaggcggcgccctttggacgggtcagcgtcacgcggcatggcgcgacgctgctgtgtcgcgtggaccatctgacctggatcagtaagcgcgtaaccacgtacggacacaaaaaaattacgcgctacctcgcgcagttccgcggcacgatggacgacgacgaggcggcgctacccggtgaggacgaagcgtggatcgcgtccaaaaacgtgcagtacgaattcatgggtctcattttcaccgtcaacgtggattcactatgcgtggacgcggaacagcgccaactgctgggcaccgtggccacctccttctgtcaccgcgtctcggacaagatcacggcgcgcaacatgccgcgcgccttttccttctacctgctgacgagcgcgcagcgcgggtacgacctgcgatttagccgcaacccgtcactcttttttagcggcgacgcgctcaactgtccgcttctcaatgagcccaacgtgttttcgctcacggtgcacgcgccttacgatatccacttcggggtgcaaccgcggcagacggtggagttggacttgcgctacgtgcagatcacagaccggtgtttcttggtggccaacttgccacacgaggacgccttttacacggggctcagcgtgtggcgcggtggcgagccgctcaaagtcacgctgtggacgcgcacgcgttccatcgtgatcccgcagggcacccccatcgccacgttgtatcaaatcaccgagggcgacggtaacgtgtactcgtacaaccaccacacggtgtttcggcagatgcacgccgccggagcaaccacgttctttctgggcgacatgcaattgcccgcggacaactttctcacgtctccccatccctgaccctccgtccgtcctcctttcccgacacgtcactatccgatggtttcattaaaaagtacgtctgcgtgtgtgtttcttaattattcctccgtgttcttaatcttctcgatcttttggaggatgttctgcacggcgtccgacggcgttttggcgccccccatgccggcagaacccggttgcggccccgtaccgctcttctggggcgacgataggtcgaaagccaccgttttcatgcccgtcgtgctcttgacgggggaacctacggcggcggttcccgtcgagcggcgtgattgcaaagccgcgctcgcccccggtttcaggatggagggagaggccacaggcggcgcattcgatacgctgcttttggccgtagacgacggtgggtaaacggtggttaccgcgggatacgtcggcgtggtcgaggcggcccggctggtgccggacaggcgacccggcgcgctaccgctcacggggaccgagggcggtcgacctaccaccgctttgccgcccaaagtaggtttcaaggaaggaacaacaccgacacggccgccccggcctttcaccggagacgggggggcactcttggccggggacggagaggctgacgaaagcatggacagcggcgatgtggcgggggacacgacatcatcctccgtgggcgacaaaacggacgccgaagctgacggctgtcgagccgaagcggaagaggttcccgcgccagaagtcacgttccttgatgacgtcgttttagacgaagccggttgaggttgcaacagcgtggcgggtaccgtcgacggcgtgcccgacacctgtttctctagccttccctgaaccggtgtcgacgtcaccgtctgcgctcgggcggacgcgtgcggcgtcgcgactcgcttgcccagcaccggtttctggctcgtggatgtcgtcgtcattggagacgataacttagctttacgtattctggacggcgtcgactgctcgggcgtctgactgggaggcgaaatgacgtcgttgtaatcggacgacggtgttgtgtgtcccaggctgacgacggagccggtgtccgaggagtcgtcgtcttcctcctcgctgtcttcgaccggtgactctgcagtttggtcccttaaagcccaaacctcatcagcggcgttctgagacgctgtttgtgtcaccgcggcgcgtggagtcgacggcctccgaggggtggtggacacggtgttttgagaagccgtggaagtcgtaggcatcctgaagggattgtgagccaggtgaggattcttgagggcccacgcgcgttcgcgcggccagttggcggggttcatatccccgggcaacggcgccgtcggagcccagggcgagttaccgttgaccggggtttgggtacccgcgaaggtaggtgtcggggccggagcgggggccgtggaaggattgacaggcgtcggcgtgaggatggcagtgccggcgccagcagggacgttaactccggcgccgaacgtcaacgtcggttgctcgaacttgtacgcggtggtgacgggcggtttggcactcgtctcggtatccgtgatgtccaccagcgtgtcggtgaaacgcggatcttgacggttggggggatagccatccgagctgtcggaatcctcgtcgcccgagaaaagatcccctctggtctccgtgagcggcctcacgtcccacgcgctgtcccgacggacccttcccgggctggccttggtcacctgcggggagacgagactgaaagccgcgtgacgctgttgttgctgcgggatgttcaagggaccgctggtcggtttctgactgcccgaggataacaggccgctgaaaacgctggaaacaccgccaccactagcgacgcccttgccgctagttcccggtttcttgatgggcgtaaagatgtttttctcgtcatcgtcatcgtcgtcgtcctcatcggcactggagccaaagagcctccgggaggcgctcggtttacgtgccgggggcggtggttgctgttgacgttgctgcaggttctgctgcctctcctcccaagccttcagctgctgtttctcacgctgcaccacctcgtcgtccacccgtttctgccgctcgcgacgcttttcctcttcgtcgtaatagccgacggccgccgaacgggcggcgtgggcgtcggcggccggtgccagagaaccatgggcctcgaagcggaacggtttgtgtcccttccagggactggcgatccagctccagccgtccagcggctgcgtggggacatgtttcttgggtaccgacgagaaggccgaaccgccgccgagcgagaggagattggcgtcatcatcaaactccaacgacggcgagcgcgcgcccaaaaaggtgtgcgccgactgcgggaagctgtccacgtagatgtcaaagtcctcgatgagcagctccagcagcgtgtcggccgagtcgccgttttccacggcgtgcttgaggatattgcgacagtagttggaatcaaaggaaaggcacatacgcagctccttgaccagcagcttgcagcgctcctgaatgcgcgccagacatttgcgctccagctcctcccaagacctacgcacgttcatgatgagacggcccgtgtacacgagcttgttgacggcgttgaccagcgccgtgttggcgtgccggtccaggttaaggtcgagcggtttcacacagaacatgttacggcgcacaccctccaggttttcttcaatgcgctgcacctccgtatccttgaggtgcacaaaggcgatgggttccgtctggccgatggctgtgaccagcgtctcgcgcaccgacatcttggccagaatgaccgcgcttacgagcgcgcgctcgacgatctcggcatcgtggcgcacgtccgtatcgaattcggtatggtctagcacagccaggtgatcgcgcgccttaccacgatcaccgaacgggtaagtgtagccgcgacgcgccacggccgcgcaacgcacctcgaactcctcgagcaccgaggagaggtcggggttgtggaaacgcagctcgcggtagtatcccaaccaaagcatgagctcgttgaacagcaccgtacgccggtgcaggcgtttttcgccacattttttcaggatcttggggtgtgcctcgagatccacgtcgggcttttgcgtgagatggcgcagaaagttgaccagggctaccacatcgcgccgctgtagaccgataaactgcaaactcatgctggcttttctccagaacccggaagcgtcgtcgccccggactgcgcccgcggtctgctattcgcccgcgatggacaccatcatccacaactcggtgagcgtcccacccaaagggagggggggtagtttaatagcggaggcggatacgcggttttcttttaagcgccgctgacttgtttcttctgttttttcgccccgtgtgctgttccgcccagacccgcaacaacactcctccgcacatcaatgacacttgcaacatgacagggccgctattcgccattcgaaccaccgaagccgtactcaacacattcatcatcttcgtgggcggtccacttaacgccatagtgttgatcacgcagctgctcacgaatcgcgtgcttggctattcgacgcccaccatttacatgaccaacctctactctactaattttctcacgcttactgtgctaccctttatcgtactcagcaaccagtggctgttgccggccggcgtggcctcgtgtaaatttctatcggtgatctactactcaagctgcacagtgggctttgccaccgtagctttgatcgccgccgatcgttatcgcgtccttcataaacgaacatacgcacgccaatcataccgttcaacctatatgattttgctattgacatggctcgctggactaattttttccgtgcccgcagctgtttacaccacggtggtgatgcatcacgatgccaacgataccaataatactaatgggcacgccacctgtgtactgtacttcgtagctgaagaagtgcacacagtgctgctttcgtggaaagtgctgctgacgctggtatggggtgccgcacccgtgataatgatgacgtggttctacgcattcttctactcaaccgtacagcgcacgtcacagaaacaaaggagtcgtaccttaacctttgttagcgtgctactcatctccttcgtggcgctacagactccctacgtctctctcatgatcttcaacagttatgccacaaccgcctggcccatgcagtgtgaacacctcacactgcgacgcaccattggcacgctggcgcgtgtggtgccccacctacactgcctcattaatcccatcctgtacgcactgctgggtcatgactttctgcagcgcatgcggcagtgtttccgcggccagttgctggaccgccgcgctttcctgagatcgcagcagaatcagcgagctacagcggagacaaatctagcggctggcaacaattcacaatcagtggctacgtcattagaccccaatagcaaaaactgcaatcagcacgccaaacgcagcgtgtcttttaactttcccagcggtacgtggaaaggcggccagaaaaccgcgtccaacgacacatccacaaaaatcccccatcgactctcacaatcgcatcataacctcagcggggtatgagctttcctgttactttattcagaaagcaccagaacccgtcgccatttcccctcatatacggtacacgtccccctgatctgtcatcacggtacacagatttcgcccgactgcggacgccgacggccaatcgcgtggcgtaggagtggcgccccggcttcattataacgccacgtcggagcccctgcgcgccacaacgccgtccggcgcaacttctgtctcggcacggtacgataaaaacgacgtcccccgtcgacgttgttttctccgagcggtgatcgttcccgtccctatcctccctccgcggcccccacggcggcggcctgctcgcacggacctatactattaccgccccaccgccgtcgtcgtcatgaacttcatcatcaccacccgagacttctccaacgacgattcagtcctgcgagccgccgagatgcgtgacaacgtggcaggctcgatttccaaagcgtacaagggcacggtacgcgccgaaggcaagaagaagctgctgctgaagcacttgcccgtgccgcccggcggctgctcgcgccgcaacagcaacctcttcgttttctgcaccgaacgcgactaccgcaagttccaccagggcatcgcacagctcaagcgcgcgccggccgaactggacccccacgagatccagcaagtcacggccagtatccgctgccgcctgcagcccagtctccgcgagccgcccacgccggccgacgagctgcagacggctgtgtcgcgcgtgtgcgcgctcttcaaccagctggttttcacggcccagctgcgccactactgcgagcaccaggacaaggtggtgagctacgcgcgcgacgagttgaccaaacgctgcggcgaaaaatcggcgctgggcgtggaggtgcatcaactggtagccttgctgccacacgagcgccaccgcgaactgtgccacgtcctcatcggcttgttgcaccagacgccgcacatgtgggcgcgctccatccgtctcatcggacacctgcgccactacctgcagaacagcttcctacacctgttgatgaactcaggtttggatatcgcgcaagtcttcgacggctgttaccacagcgaggcctaccgcatgctcttccagatcggtcatacggactcggtgtcggcggccctggaactctcacacagcgcggcggccgggctgcccgaggccgatgagaacaacgacgagggagaggaggacgacgacgagctccgtcacagcgacccggcgccgcttcacgagtccaagaagccccgcaacgcccgtcgtccccgcacacgcatgccgcctcacgagcaaaagcccgaagaaaacgaggaggaagaagaggagctgtttccctcctgcaaggcaaccgcagcattcctgcgggcagaaccctccgtctccaacgacgacggcaacggcggcgaacgctgcgacacgctagcgaccgccctgcggcattgcgccgacgaagaagacggacctctagccagccagaccgctgtgcgggtcgccgcgaccccctcaccttcagtcaccccagcccttacccccgtcacgtcccccataaccccgttgtgtatttaacgtcactggagaacaataaagcgttgatttctcaagttccgctctggttttggtttcgttttcaaagggagccccatcatggcccaaggatcgcgagccccatcgggcccgccactgcccgttctccccgtggacgactggctcaactttcgggttgacctgtttggggacgagcaccggcgcctgctgctcgaaatgttgacccagggctgctccaactttgtggggctgctcaacttcggcgtgcccagccccgtatacgcgctggaggccctggtggacttccaggtgcgcaacgcttttatgaaggtaaagcccgtggcccaggagattatccgtatctgcatcctcgctaaccactaccgcaacagccgcgacgtgttgcgggacctgcgcacgcagctcgacgtgctgtactcggagccgcttaagacgcggctgcttagagggctcatccggctctgccgcgctgcgcaaaccggcgtcaagcccgaggacatcagcgtgcacctgggcgccgacgatgtgacattcggcgtgctaaaacgagcgctggtccggctgcaccgggtacgcgacgcgctggggctgcgcgcgtctcccgaggccgaggcgcgctatccgcgcctcaccacctacaacctgctgttccacccaccgcccttcaccacggtcgaggcggtggatctgtgcgccgagaacctgtccgacgtaacacaacgtcgcaaccgaccgctgcgctgcctcacctccatcaaacgcccgggctcacgcaccctggaggacgcactaaacgatatgtatctgttgttgacgctgcgacacttgcagctgcgacacgcgctggagctacaaatgatgcaggactgggtagtggaacgctgcaaccggctttgcgacgcgctttacttttgttacacgcaagcccccgagacgcggcagactttcgtcacgctggtgcgtgggctggaacttgcgcggcaacacagcagtccggccttccagccgatgctgtacaatctgttgcagctactgacgcaactgcacgaggccaacgtgtacctctgcccgggatatttacatttcagcgcgtacaagctgctgaaaaagatccaatcggtctcggacgcccgcgagcgcggcgagttcggggacgaggacgaagagcaggagaacgacggcgagccgcgcgaggcccagctcgatctcgaagccgatcccacggcgcgcgagggcgagctttttttcttctccaagaacctgtacggcaacggtgaggttttccgcgtgccagaacagcccagccgctacctgcgccgacgtatgttcgtggaacggcccgaaaccctgcagatcttctataacttccacgaaggcaagatcaccaccgagacgtatcacctccagcgcatctatagcatgatgatcgagggcgcctctcggcagacgggcctgacacccaagcgcttcatggaactcctcgacagagcgcctctgggccaggagtcggaacccgagatcacagaacatcgcgatttatttgccgatgtttttcgccgtcctgtgaccgacgcggcttcttcgtcgtccgcgtcttcgtcgtcgtcctcagcatctccgaattctgtttcgctgccgtctgccaggtcgtcatccacacgaaccaccacgcccgcgtccacgtacacctcggccgggacttcttctaccacgggtctcttgctctcctcttcttccttgtcgggatcgcacggcattagctccgcggacctggagcagccgccccggcaacgacgccgcatggtcagcgtgaccctcttttcgccctactcggtagcctacagccaccaccgacgtcaccgaagacgacgcagcccgccacccgcaccccgagggccggcccacacacgcttccagggacccgacagcatgccgagcactagctacggcagcgacgtcgaagacccgcgggacgatctggccgaaaacctacggcatctctgaacgcggtttttcctctttttctacgtgtctgtctcaggacgagacgtcgatatcaataaaaataccgtcgacgtggtttttttaacagtgtggttttctttattgactagcggagtacacagtttacgagtaaaaaagacagggaaaggttatataaaatgctgtattatatacaaaaacatgcacataaacagacgggaccaccgtgctcgtcatcctctcctcaatcagttgttcatgtaggcgtgtggcggggtgaggggcggcatgccgttggcggcgccgggaataatgtgccgtcgaccgacgtcgcacaccttgaaacgccgtcggcgcacgcagcggtcgcaggacgggatatcccagaggaagcccatgtaggtctcggggtcctcgtcgtgaaagcggtaggagagttcaaagtggtgcaacgagcccgtccgagctcgcagcttctggcgaacaccctccacgtcatcggtgcacaacgacagtgctgggctctcacacagggcctgaagctcctgcggccacaggtgcgtggccaggggcgagtccgtcgtcaccagtttgacgcagtgcatcaggttctcggtgatggcgtcgtacaggcgactctcagcctcctcgtgcgtcatcacgtttcgaggcagcgacagctcgtcgtcgtcatcctcgtcaaacatgatcatggggtcaggggtttttttgggatgttgacaggtgggtgtcttttccagacgcacgatggcctcacgccggccgctgaaacggtggtttcggtgtcccttctttcccatgacgcaggtgaacataaccacgtcctcggccaaacggtagacggcgtccatggcggggtcgtagccgtagacgacgccgaaagtgtccaccaagacgtactggcgtacgaggaactctttgcgttctggcacctcgtggcccagcgcgcccaacaactggtggtaacaggtgatgcgcggcacggtacggatcatgagctccatggtctggatgctgccgcccgcgcggacgacgctgaaggatgtttccttgaacttcataacctctgtgttgtgggtccagaaggcgaaatgggtgtcgggacactcatcgaaagggtcgtcgatggtgtaggaagcgtagccccgcttggtcacctcggccgacaggctctccacgtcaccgcggtagagcatgacggcgttccagtaatcgtcgtactgcaccatgggccgctggtagtcgcgcatagtgtggaagtggtcgcagtgacgaaagccatgccgcagaaagtccttcatggtggatgccagctcgtagacgcagtcgcgcaggtcatcgtagcagtagatgccgccgcgctgcccgatgagcacgatgagttggtagcgcataaagcccggaccctcgacgaagccaaaggggtgcaggtattcctgacagcacacgtaagcacctggtggagaaataagaaaaatccacgcacgttgaaaacacctggaaagaacgtgcccgagcgaacgtcctctttccaggtgtcttcaacgacgtggggcttaccttgcgaacagacggtgcccatcttgcccacgaagggccccagggcgttgcgcgaacggagctggatgaagcagcgttcgggccaggccacgtgcagccgggtgccgcattcctgctccagaaagtcgttgagaccgttaaagtccccggctcgaatggcgatgcagccgtaggccatcagcgtgtcccgtaggtcgtccatgacggactcctctaccttcgctcgccgacgctgcgcttctccagccaccgctgcggtcgacagactccttcgtccgccttcggagaactacggcgcggcggcacggcctttatagacactatcagcgttgacgtcagacgatccgatgaacgtcgttttttgtgctggaacttccctcgtcccgacaaatgtagcggaaatcttcaagcaaatcgcgacgaagtccgatgaggaggatgcaaaagaggctgagcaacgcgatgctgcccgccgccacagtacatatgctcaacaacgcccagtgtcccaacgcgcgacttttggctcggagcagagccgaacggcggtttctccacatgacagataacgtggtccagtacgtccatcctttgcattccggcgtccagacgggaagcgttgtcatgttagttcccgtaaaggtcgtgttttgtcttgttttgtttctcatgagtttaacagtcctttttagaaaccgcgggcacatgtcttgtagaaagatgtaatcactctccgcgtatgtcgctagggttgacatcacagtggtagtgttttccgaagaagtgacgttgtcagtgatattgtcagtgacgttaatttcttcccagtgtacggataactcgaacggtgtcgtatgcgccaccgctctcaacacgtaactacggccggtgaggttaagtgttagttgtcccacggtcacattggtgtcatttgtaaaacacgcgatttctccgcgaacttccgtgacgttggtttcacgggtctcgttgagaacacgcagaggaaaccagccttccagatgatactggaaaccaaacgtaagcatgacgctatgccattgtctccgtggttgccgaaacgttacgttcagaggcagtttggcttcggctcctgcgcaaggcccgttatagatttgcgtgtcattgcgcgtacagtttaaccggcagttcatactcgtggtgttagaagtgatgttaacacccgtgccgtggtacgtgcatcggaccgaaacaccgtgtcccgtgctccaaaacagcgtcaacaacagccacacagacacctacgtggagacgacacgggactttttattgacggagactcacgtttctaccctcccctttcccgtaggtaaaaacccacgtttatcacacacgttgtttttacctgaaacccgcgcagcccgtggacgcgacaaaaaaccgcggcactagaaagaaaatgaaacaagtatgtttattaagcagcatgtggggctaataggggggataactgaggtatagcaactatgaaaaaatactacaaaaaaaaaagctgaacatggtcatctagcagcaaagttctccttctagaccacgaccaccatctgtaccacgtcgccctccccggtcgtgtacatcacatccttcaccacgaccggtggcaacggcggcgacgaggacaactcgctctcgacggaggccgggacgacagaggacgggggggtggtggcggcggaggacggaggggtggcggcgacagcggggtcttcttccgacacgggcgacggcaggctcggcggcgcggacagcacccgttgcgccggggcgtgagaaggctgagccccggtggcctggatgtgggccaacgaattggctcgcagcgagtcgcgatccacgaaggtcataggaattttcccttcgcggatccgccgctcagattccaggatggcgcgcacgtagctgttcaccgacttggcaaaagtgcgcggcccttccgtattcttgtcgcgacgcgcttccagcacctgcttttcgtagtccagctggtggaagaccatcaccaggtcgtccatagtgtgcgcgtgctgacggacgtgggagcgcacctccaccgggaacaaagcgttccaatactccagcacgatggcaccgtgccagaactgcgccatgctgggcgccaggaaaaacaggataccggagtcgtaggcgaacacgtcccacttgggcgtcatgaacaacaccagctgacgcgtgggccgcaccgaagcttcctcccaggcctcgatgaccccgaacatgatgagctcctggtccaacggggggcagtgtcgctccagccaactgatcttgctcaggttcatctgcagaaactcgtaagaggggtcgcagatgcacacgtagagacccgagtcgtgccgcagcctggctccgcgcttcatcagtttcctcaccgcgtagcgaagcgccaccttgcccaacgccgacgcctggatcagtccccccacgtccatctgcgtctgtcgccactcggcctcgtccagcaggctcgtgatagcggaagtgctatgcgtggtcgtagtcatcctttctatccttctctatgaatagcagcaatagcggtaaagtcccttcttatactatcccggagtctgtggttttttttgtttacccctgcttactggtgagactgctgggggccgttgtgctgcagcagctgagctcgtcgccgccgttgccacaggaaccggtgcctccgcagggcctttttgagggcctcgcaggcttctcgcgcaagtcctgagaggccctcggcgtcgatggggttcacctcgggcgtccgagcctcgttttcttcttcttcatcctccctttcctcctccgtgtcctcccgctctgtgtcctccgttacgctctcctccccggcctcggccaagagcgcagccaccaagtccacggaccgctcggtctccgagttctcaccgtcaattacgccatgttggcggcgtaaccggtgccgagaacgccgggtgagcgcacatgcttttttctttcttaaccaaggcgggagaggatcttcaaggcgttttcgctggatccagcggtagctaaagtaccaaaaggccagcaggcccacgctacctaacagattcacgtagactggagacataattaaagaaagaagtgaaacccgcgtgtgggtctcacgtcgtcttgaaacaccgtcttatatacatgaagatgccggacatgacgcgcccaagacacgtggggtttcccccttaggggacccggtttcttaagatgtttttcatcttcgcacgcgatgtactacatcaaagggtcggctgaccgaccgcattgacgcacagtttccgagtacgcgcgtctcggagcacctgacggtgagccacccagctcacgcggataggggacaacactgacgtgaggggcgattcacgtcactgacggctgacgggaataagacgggtgagggatttccacctttttcttaagtgtgactctccttacggtaaatcgcacctgtgacctcttaacccctcctccctggtacccaataacagtgaaaaacacacaccacacgtcacgacaccgatcgattttctttattcttagtgtgatgataggtaagggcactcgtgaggatgtgcagttatcattatcaagccttcttcaaggcgtagtgatgatcgttgggcagaacccccaagctcctagcgatctgggaatagaaggaggagaacgaccccagggccagaatgcccacagtgtacatggcccaggtctccagaccgaacgtggcgggtcgcagcttcagatggtaggccacccgctccgagagttgtgaatgctcgttcaggcaacaggactgcaggtgggtgagcccaaaagcgctttcgtttacgccgcgcacgtgcaccgtctgggccgggcaatcctggtgttgcgcgcgaaaatggtcctgacaggagattccgtctacgtggcggcgcgtgttgttacccacttcgatcagcaacgtgttatcggcaggatgatgcgagaacgcgacgacggtgttgctggaggtctggcggcagcagtacacgtcgagcgtcatgagggccatgtcgccttggtggtacacggcgtacgcccaaccctggaacacgagcggacatcgcggaccgtgagcggacatcgcgccggcggttgttaccgtcgtctcggcaggagaacacaataaactcctgatcctcatacacaggagtccaagcgtcagaattaaagtccgcggagccataaccgcgcaagtgaagccgatacgagtgttgctgaatttgttcattctgccgactgttgctcacgagcgttcggaggcggtgccacaggctgttggccattaaaaagtcctggcccgaatgacgacgagacagagcccgaggcgaagaaaaaggcgcccgtcatgaagacgtaggcaggggaattcccatatttttatggcttcttttaaaagtctgtatccgactccatccggcgcttttcccaaaccgtggtctcctcgtcgtccgactcggtacccaggaggtggtaagtcttttgccgcacgtagaaagctttcaacgtggagcaaaaaatgagaataaagaccccgaaaacgaaacaaaccacgccgatcatgccgatgcagacgttcatgtcgacgtagccggcggtgctgttggcggtgcggcaaaagagtgtcatgtcgtgcgtgcacaaaaaacaacacacaccacaggccaggtcgtagcgtagttattattccgtagcagcaatgatggtacagtcaagcacatgctctatttcccgttaccccgatgatgatgatgatgttgtccccgttgcagtggaattgtcccggttaatcaccacggtgaacaccacggccaagaaaatgatccctaatatagcgaccactaagagagcaaaagtccatttccagccgttgtcaaagtacgcccccgtggtgggatgcatggtggcgggcatttccatcatatccatgtcgaacgtgtgtcgcggcgacggcgaactaaccaggcagtacgggggtcgatagggcggtgggctgcagtcgggtggtggcggcggtggcgtggaaaccgtcgtcgggcacagacccatggcctgctcgtaggtggggggcgcgtcgtcgtgatcccggtcgcggagcatcggcgtgggctccatgtcggtggcagtgacggcgacggtggtaactgtggtggagacggtaccgacggcgtccgcggctcaccttcgagcaaagagccccttctttttgcgcaaacgacggcaaaacagttctctgggacagccggtggcgcggtaagcgggtgccacgctttcagggtgggtaaaacagtcgcgggcgaagcagtagttgttgcagaaccgcaaaaacccgacgcgaaagaagcccaggagtccgcgcgccagaaagtgcgcctgccgcgtctcgggatgcacgccgaagacggcgccgctctcgttcaccagtatggagatgtccaggcgctgctgcgactccaccggcacggcccgcaccacaaatacctgcagcacgttcagcgagcacgtctcttttaaccagttgccgtgggccggatcctcgtaagtctggctcccgttcaagacgaccgtcgtcagcgcctcattaccgtctcgccagctgaagatggaaccctcgcgcttcatgcacaggcgccacagggccagcaggtcgcgcgccaacatgaactcgcgacccacgtcgccgccggtctcgaagcggacatagcccagttcttcgcgcagcggcgcgtagttgcgcaggccctcctgcacgaagccgcggaaaccggaccgcgacaccaggtacagcgattccaccacgggcgagtagacgtagacgcggccgccctcgccgatgagtacgggtagcggtgggcggccgatggcttcgcaacgactcacagtgcccaccggcagcaggaacttgtcgcagcacaggaaggtcttctccaaacctttaatattgagatgtccaaagtagccgacgcgtaacaggtcgcagtaggtgaaaaaccaaccgttcggccagctgagacgcagcaccgtgccgctgacgcgacgaaccagcttctgcaggtccttgcgggcgtcggcggtgacagagcagcggaaggtctcgttgaccagctcgacagccagcgcgtcctccagcgtacgttccttcatctcgtcgttgatgctctggcggcgccgccggatttcgtcgaaacgagccgcggaggcggcgaccgacgcggaggtcgtccgaacgccctctgtgacgctgtcgtccggccagtcaagaaagctaaggctggcgctgcgccgcctaaagtgtccgatccgcgcgggacgtcgctgagggacggtggctggtctgctggggcgggtacggccgcgggtgtccgcggacacgttagttatacacggaattgagtcacgtggcacgttgccagctgaaaccgccgtcgtctccgccggcgttttctccatcacgggaccgcgccgtgcgcgcgttcccaggcacgcggcccacgctctacccgcacttttgcttcttggtgttagggacgaactcgaacgttacagaatcctcgctgtcgctctcctctttcgcgtcgttaaagtaattgccggagttgcgatccaaaccgccgcctcctcctcctccgccgccgcccgatccacctttggacgtcaggtagctggtgatcttgtgctgctcgtatttttccttggaggaaagaccgtggtcgtgatcaccgccgccgccaccgctgctcattttccgcgtaccggaaccaccgccaccaccgcggtcgtgcttcttgccgccaccgccgccacctcctcccagaccgccgagacccatgggttcgttcatgagatcgttatccagacccgggccgtcgtcgtgcagaccgccggcattggccagcgaagagaggctgccgccaccaccgccgccgccacgcgacttgccgctgttcccgacgtaatttttatcgaagggatcgccacgctggaaaggttcctcggtgagaaaattctccacggcgaacagaccgttgcgactggccacgtacaacagcgtgtcgtgctccgtaactatacgcaacgtgcacggcagtttggtgacggcgcaattgagcagcgtctggtagaagttcttcagctgcacgttgatacgcatgttttttacgccgtggaaactgacgcggttattggccgtgaattccagctcgctgccgttggtcaggatgaatttgatggccggcggaccggcgtgcaccagaatctgcacggtgcccgtagggcagggcgcttttttaacgttacgcttgacgcgggtatgcggcccgatccacttaagcaggtcggccaccacgccgaaatctagatccacgtgcacggccgaattctcgctttcgcgcacaatgtcttggccgtgcacgcaggccgagctgaactccatattgaaatcgggcgcgcacatggagatcttggccgaaaggtccgagatgtcctgcacgtagaacttggtcaggtccttgctggaagtcaggtacatgaaattaccgagcagcggcgtggaattgttaatggtcttgggctgaaacgacttgtcagtgatgtagagacatgagctgttaaaagtgatttttgacacgcagtgactgcgtaccgtttgcaagataagcgacggcgtgggcaagaaggtaaccgtggtgttctccttgagcgcacggatcacagatcgcagctgctggatagccgtcttgtacggcttcagccgcagcgccagcgtcggcggctccgagaggcgcgtcttgcgatccatcccggacagcgtgcaagtctcgactaaggagcgggcgcgagcgagcgaaagttttatagagagcacacacgacgaccgggaacgctgcgaagacgcccggcgtctaataatacagccgcgccgagccagcgggcccccgactaagaggcacagtacttatatactccgaccttaaagcgccagtggtaccacttgagcatcctggccagaagcacgtcgggcgtcatccccgagtcatagtagaaaaccagggccacgcactggtccacaaacacgctcaggttcacggccgccatttccacgtcgttttggatcgccggcgccgcctggaacagacactgcgtcgccttaccctcctcctggtgctgctccaaccacgcgtaattcaccacgggcacgcgcagcggcctccgcaccacggtggggaagtaacactcacggttgggcgggcacaatgaccacaccgtctcctcctcgaacacggtgccgcgcgaagcccacactgacggcgtcacgccccacagatgcgccacctcgtcgtcgggacccaccgccagaaactgacagttgcgcaatccgaactcgagcatgtcggcgcgcagcgcttcccagcgcgcgctggcgatagagagccgcggcaaccgatacaattcgaaaatgaatttgccctcttgatagatggtgcgttcgaaccactcgcagcgcggcaaacccgacttgcacaaatcgacgctagcgcgcaccgcggcaaagtacatgtgctcaaagatgcgctcgatcaagtcccaagaggcaaagtacgtgaaccctaaccgcatgagcgccgtgtgcaagccggccacgccgatgtgcagcggacgcagtttttccagcgcgctctctacccaccattcggacgctgacattagcgcgtccaggcgcgcgttgccccaaaccaccgcctcggtcaccaactcgcgcagcacgctcaaatcaaagtaacgtcgcgtgttccccaaaaccacgtcgggtagatgcagcttctgctcgtcgctacgcgcaaacacgcagcgagccacgttcaccgtcagccgctgcaccggcatgtcacactcgccaaagtggcacgacgccatatcgggactcaagcacggcggcaggcacacgctgtcggccataatcgagtacttgactacgtgatggacaaagaccaccgaggcacggcccttgagcgcgcacagcaacatctttttcagaaaatcgtccgtgttcacgatcaccttggggcacgattgctcgcagcgcgaatactctttctcgaaagccgactcctgacccaggtccgagagccgccgggagacaggccgcccgaacagcgagtagcgctgctcacgcgcacggtatcgcttcattaacacgctaggcacgttgaaagcgtagcaaacccccgtcaactccgacgtgctttctttgagaataaagttaatcacgcggatagcggccacgtcccacatgtccacaaacacacgtaccacgggtcgatgcacctccttctcgcgtatcaaatcgcagtatccccccaggcaacgaatcacgctgttcacatcggcgttaagtcgcgttacgttcaccgacacagaaacgccgcaactcaaggtgctcatccatttgcacatagccgcccaactggcgtcacgcgaaaaagggtcggccgagatcagaaagtcgtactgcggcacgcgatcgaaacccacggtagacatggtgaaggtggacagcgacagctgcccatcgcgacagcgcttcaacaccgattccaacacctcgccttcgaaacgcgcatccagatggaaacgatagatgcgcgagtgcctactgttctcgatagccgccgtcaacgccacggcgatgcgcaaaaacacgccgcccggactctcgtcctgtccgtgcagttggcgacacaccttatccaaacacaaaatggccgcgtacaagccccagcaaccggccaattccacaaaacgcgccgtctcctcggccagcttgggtagatcctccatgtgacgcagcacaaaacggcgcaccgactcatcgcacagctccgaagcgtaacacagtggcgtgcggctttcacgcgcccagttggctttgaaataaaagcgacccaacagcagatcgcaacgcggcgagtgacgaattagacagggaccgtggcgcatgataagctgaaacagcctgaaactgcccaaaccggcactgtgccgcgacacggtgtccatctcgcgccacagcgcgttcctgtcggacggcagctcccgtgccggctcctgtacgccgcaaaagcgaaacttgccccaatagccgtgacaatgacactttttgcccatcaacatgcgcgtagcctgtatcggcggcgatactttgcagagcgaagccccgaaatcgtcctcctcctcgacactgtccagctccatcctggtcgcgccggtcggattgaaggtgctcaaaccgctactcacgcgtccaccgcgactgggcacggcggaaccgctgtcacgcgtcaacgacagcacagacggcgtgccgtcaggagacggcgactcgggacgccaactgacgacgccgccaccactcgtaaaacccgctacacacgctacgccgctcgacatgttagtattttcagcggatgcttccttgtcacccccgggcagcggcccttcctcgagctcgctgtcatctcccccggtagtatcagcgacggcctctgccgacgattcctccgtctcggtttccgcgccgcggctcggaatcctacctggccggcaccgatgtgcgggcaccgaggacacccgctgttcctcgtccgcgtcagccggagtcataagtttacgaggaaaagaacaaagaaatcaggtagatttcaataaagtgagtctagatggcgccgataactacggtttataaagtctgtgtgcgatgtgtttatttttttcttctgtgtctcctccccgtatgctgtcagcgccgctcagacgaattctcgaaagtctcccaattcgacgctaaagttgtccaaacggacgacggacagtttgagttctttgtgtaccaggaacgaggtgtgaatgtcgtcagccaggcaccagcccagcttttgtatgaccccggtacacagagggatctggcgtgggcgcgtgatgcgacggttgacaaagctacagcgctcgcgggcgaactttccgcgtgcaacgtcgaccagggtctgccagtgtgcgatgctggaggtgagcacgtagatgccgggacgtgtttcgggcccgtcatagtcatagacgatgattaaatacacgtattgcagccgtccccgggtctcttcccacgtcagatacatgtctttcggtatcatcaacgcgaacacctccgttttgagcgtgttgtaaaggtagccgcgcatgacgcaggtgagcaacgaggtgatgcccagcgagacggtcttgacgcagcccagcgtctcgaggcggcggtgcagcagatgcgggcccagatccagccactgcagcgcggcgcgcgcggccgaggccgtgtacacgctttcgagcaggcagcgcgtgctggccgagacgttggaggcgcgaatgcctaacaggtagaggctaatgtagaggtgtcgcggcgagtcgcaacccgtctccatgcggatgagcagcgcgcccggctgcgcctcgaactctaccaggccctcgggcacgaagaaacgcgccgtgagcgcctggtgatcggcgtggtagaggtagcgcaccgatatagtatttacctcgcgtttggctttgagcgccgtcactagttcattgtcctcgtcggccgggtcgcgcggccgtttggccaccgcgcgcgcgtccatgatggcgaggcgcacggtagatttcaaaaagttgatagagcagctgcgggcacgggccacggacaaagcggaggcgttaaataccgtgagccaattggagatcggcgcggtggatgcccaggacgtgaccgcgagcgccgtgcgcgccttcgtgggtgcgttgccgagctcgggctaccactttggcttcgtgcgtcagaacgtggtcttttacctcctaagccacgccacggtacagacggcgcgcgacccgctgtacgccgccgagcagttgcacgaacagctggaccgcttcctgcgacaccagcacgacggcggcggggacgaggaccggttgccgttctaccacaacggggccacactgacggctttccagaagctgttgcagaccctgcgcgagatccagaccgtaatagccgaacagagcggcggcaccgcggcagcggcggacttgatcgccagtaacaacgcgtcgaccgagcgccgcggcaagaagggcggttcgagttccgggggccagcagccgctggtccgccgggtgatcacgcagctggaaacggctgccacggaggcgcggccctacgtcaattgtcgcgccgtggccgaactcctggacctgacctaccagcggctcatctactgggcctgcacgctcatgccctacgtgttgtttcggcgcgacaccgacaccgaactggacacggtgcttctgatgcattttttttacacacactaccgttcggttaacggcgatttggccgtggagtttcaaaactacgtcaagaacagcgtgcggcacatgagctctttcgtcagttccgatatcgacggcgaccagaagcccggtgccgaacacatgcgtgacgtcagctacaagctgttcgtgggtaatctgcaggcgcgtgacgccagcggcctcatgtttcccatcattagcacgcgcatctccaccgtgaacctttacctgtcgcccgaacgtatgtttttccacccgggtctgatctcgcgtctgttgagtgaggaagtttcgccacgcgccaacctagacgcttacgcgcgcgtgtgcgatcgcgtgctggaagaccacttgcatacgccgcgacgcgtgcagcggctactggatctgacgcagatggtaacgcgactggtggaactgggtttcaatcacgatacctgcgcggcctacgcacaaatggcgctgatccagccggccagtcagaagagctcgctctttgtcagcgagattcgcgagaaactcatacagatcatctacaatttttacacgtttttcatgtgcctctatgtgtacagccccacgttcctgttcgaccaccggcggcggttgattttggagcagcatcgatccacgttgatcggctccaaggaggaactacagcacgtctggagcaacgtgatactgaacgtcaatacgcactttgcggttcagtacacggaagaagactttgaggcacatacgaagggtgccacggaggcggagcgcgagtacctgtatcgggacctgcacagcaagtggggcgtgcacctgtttaccttgcgtccgtctcgcggcgcggccggcgcggcctcgcctttgcctccgcttgacggcgtcacacgctccgacatcttacgcgaatgcgcgctcgttaatctgaacgaaggccgcgtcaactacgcctccctgctagccttcagtcatcatcccgagttccccagcatcttcgcgcagttggtggtggtaactgaattttcggagatctttggtatcccgcagggcctgtttcaagccgtgggttcgccgcgtctttttgcgctcattcagctgtgtcgtgtattgttgcccgagcaggtgacgctgtaccagaacctggtctccatctacaacctgaccacctttgtcaagcacatcgacgccgcggtttttaagacggtacgcgattgcgtcttcgacatcgccacgaccctcgagcacctcagcggtgtacccgtcacgcccaatgtggacctgctggccgagctcatggcgcgctccgtagcgcataacctgtacaccaccgtcaacccgctgatcgaggacgtgatgcgcagcagcgccggcagtctgagaaactatctgcgacacacgcgactctgtttcggtctggcgcgtgggcgggcgcgcctctcggaggacggcgtgacggtgtacgtggaggtacagggtcagtacggactgcgcgtacctaccacgcgtttcgtagaacagttgcgcgagctggttcgccgcgatcggctgttggccgagaatctgcgcggcttgaatgagcgcctgctgagtgttcgcgtgcgcgtacgtcagatcagcagcgacacagaggaagtaagccgacacgccaagggtcaccgcacggtggcccagatgagcaaggcgctcaaaaagacggcctccaaaatcaaagtgttggaaacacgcgtgacattggcgctcgagcaggcgcaacgttccaatggcgccgtcgttaccgcggtgcaacgcgcgctagccgtctttgacgtactaagtcgcgagaacttggaacgccgcggcgcacagctctgtctgacggaagcgacgagcctactgcaccgacatcgcgcgctagcgccgatgacctggcccgcgggcacgggcgttgcggcggcggccgaagcggatcgcgccttacgcgagttcttggaggcgccctgggaatcggcgccccaaccgccgcgactccgcatgacgcccgacaccgatcacgaagaatcgacggcaggcgcgacgtccgtaccggaggtcctgggtgcgcgctacgaacccgcacacctggccgcgagcgacctattaaactggtacatcgtccccgtaagccaggcgcagcaggacatcttgtcttcgatcgacccgcccgccggctcgacatcggtgtccctgccgccggcctcgccatgaaagtcacgcaggccagctgccaccagggcgacatcgctcgctttggagcgcgagcgggcaatcaatgcgtctgcaacggcatcatgttcctacacgccttgcacctgggtggaacgagcgccgtcctgcagaccgaggcgctggacgccattatggaagagggcgcgcgtctggacgcgcggctagagcgcgagttgcaaaagaagctgcccgccggcgggcggctgccggtctaccgactgggcgacgaagtgccgcgccgcctggagtcgcggttcggccggaccgtgcacgcgctctcgcggcccttcaacggcaccaccgagacgtgcgacctggacggctacatgtgtccgggcatcttcgactttctgcggtacgcgcacgccaaaccgcggcccacctacgtactcgtcaccgtcaactcgttggcgcgcgccgtggtcttcaccgaggaccacatgttggtctttgatccgcacagctccgcggaatgtcacaacgccgccgtgtatcactgcgagggtctccatcaggtgctgatggtgctcacgggcttcggcgtgcagctgtcgcccgctttctactatgaggccctttttctctacatgctggatgtggcgaccgtgccagaggctgagatcgccgcgcgtttggtctccacctatcgcgaccgcgatatcgacctcaccggcgtcgtccgggaaagcgcggacacggcggcgacaacgaccaccgccgcaccttccttacctccgctgcccgaccccatcgtcgacccgggctgccctcctggcgtggcgcccagcattcccgtctacgatccctcgtcctcacccaaaaaaacacccgagaaacgccgcaaggacctcagcggtagcaaacacggaggcaaaaagaaacccccgtccacgacgtccaaaacactggccaccgcctcctcctcctcctcagcgatagcggcggcctcttcttcgtccgcggtaccaccgtcctacagctgcggcgaaggggccctgccggccctgggccgctaccaacagctggtcgacgaggtagagcaggagttgaaggctctgacgctgccgccgttgcctgccaacaccagcgcctggacgttgcacgcggcgggtaccgaaagcggcgctaacgcggcaacggccacggcgccgtccttcgacgaagctttcctcaccgatcgtctccagcagctcatcatccatgccgtcaatcaacgctcgtgtctgcgtcgcccctgcggcccgcaatcggcggcgcagcaggcggtacgcgcctatctgggcctatccaagaaactggatgcctttctgctcaattggctgcaccacggcctggatctgcggcgcatgcacgactacctgagccacaagaccaccaaaggcacgtactcgacgctggatcgcgcactgctggagaagatgcaagtcgtcttcgatccctacggacgtcagcacggcccggcgctcatcgcctgggtggaggagatgctgcgctacgtggaaagcaagcccactaacgaactgtctcaacgactgcaacgtttcgtaaccaagcgaccgatgcccgttagcgacagcttcgtctgcctgcgacccgtagactttcagcgtctgacgcagatcatcgaacagcgacgtcgggtgttgcaacgtcaacgcgaggaataccacggcgtttacgagcacttggccggcctcatcaccagcatcgacattcacgacctagacgccagcgatctgaaccgacgcgaaattctgaaagcgctgcagccgttggacgacaacgccaagcaggaactctttcgcctgggcaacgccaaaatgctagagttgcagatggacctggaccgtctgagcacgcagctgctgacgcgcgtgcacaatcacatcctcaacggctttttgccggtagaggacctgaagcagatggaacgcgtcgtcgagcaggtactgagactcttttacgacctgcgcgacctgaaactgtgtgacggcagctacgaagagggattcgtcgtcatacgagaacaactgagctacctcatgacgggcactgtgcgcgacaacgtaccgctactgcaagagatcctgcagctgcgacacgcgtaccagcaagccacgcagcaaaacgagggtcgcctcacgcagatccacgacctgcttcatgtcatcgagacgctggtgcgcgacccgggcagccgcggctcggcgctgacactggccttggtacaggagcagctagctcaactggaagcgctaggcggcctgcagctacccgaagtgcagcagcgcctacagaacgcgcaactcgcgctaagccgcctctacgaagaggaagaggaaacgcagcgtttcctcgacggactctcgtacgacgatccgcccaccgaacagaccatcaagcgacacccacaattacgcgagatgttacgtcgcgacgaacagacgcgtctgcgactcatcaacgccgtactgagcatgttccacacattagtgatgcgactggcgcgcgacgagtcgccgcgaccgacgttttttgacgccgtcagtctgttgttgcagcaactgccacccgactcgcatgaacgtgaggatctgcgtgccgccaacgccacgtacgcgcagatggtcaagaaactggagcagatcgagaaagccggtaccggcgcatccgaaaaacgcttccaagcgttacgggaattggtttactttttccgtaaccatgaatatttctttcaacatatggtcggacgactgggcgtcggacctcaggtaacggaactctacgagcgatatcaacacgagatggaagaacagcacctggaacggctagaacgtgaatggcaagaagaggccggcaagctcacggtaacttctgtggaggacgtgcagcgtgtcttggcccgggcaccgagccatcgtgtcatgcatcaaatgcaacaaacgttaaccaccaagatgcaagactttttagacaaggagaaacgtaaacaggaagaacagcaacggcagctactggacggctaccaaaaaaaggtgcagcaggatttgcaacgcgtggtggacgccattaagggcgagatgctctccaccatcccgcaccaaccactggaggccacactcgagctgctcttgggcctagatcaacgcgcccaaccgttactggacaagttcaaccaggacttgctgtcggcgctacagcagctgagcaaaaaactagacgggcgaatcaacgagtgtctgcacggcgtgctgacgggtgatgtagagcgacgctgtcacccgcaccgagaagcggctatgcaaacccaagcctcgctaaaccacttggaccaaattttgggtccacaactcctgatccatgagacgcagcaggccctgcaacacgccgtccatcaagcgcagttcatcgagaagtgtcaacagggcgatccaactacagccatcacgggcagcgagttcgagggcgactttgcacgctaccgcagcagtcaacagaagatggagggacaattacaagagactagacaacagatgaccgaaactagcgagcggctggatcgctcgctgcgccaggatcccgggaacagctccgtcacgcgtgtacccgaaaaacccttcaagggtcaggagctggcgggtcgaatcacgccgccacccgccgacttccagcggcccgtcttcaaaacgctgctagatcagcaggccgacgcggcccggaaagcgctcagcgacgaggccgatctgctgaatcagaaagtacagacgcagttgcgacaacgcgacgagcagctgagcacggcgcagaacctgtggactgatctggtcacgcgccacaaaatgagcggcggactggacgtgaccacccccgacgccaaggcgctgatggaaaagccgctggagacacttcgcgagctgttgggcaaagccacgcaacaactgccgtacctgtcggcggagcgcacggtgcgctggatgctggcctttctggaggaagcccttgcgcaaatcaccgcggaccctacgcacccgcatcacggaagcaggacccactaccggaacctacaacagcaagccgtcgagagcgccgtgacgctagcgcatcaaatcgaacaaaacgcggcctgtgaaaattttattgcacagcatcaagagacgactgccaacggcgcgtccacgccgcgggtcgacatggtccaggcggtggaagcggtctggcagcgactggaacccggacgcgtagccggcggcgccgcgcgtcatcaaaaagtgcaggaactgttgcagcgcttgggtcagacgctaggcgacctagaactgcaggaaacgttggcgacggaatactttgcgctgttacacggaatccagaccttcagctacgggctggactttcggtcgcagttggaaaagatccgcgatctgcggacccgttttgcggaactggccaagcgacgcggtacgcgtctctccaacgagggagccctgcccaacccccggaaaccgcaggcgacgacttcgctgggcgcctttacacgcgggttgaacgcgctggaacgacacgtccagctgggtcaccagtatctgctcaacaagctcaacggctcatcgctagtctataggctggaagacattcctagcgtgcttccgccaacgcacgagaccgatcccgcgctgataatgcgcgaccgcctgcgtcgcctatgcttcgcgcgtcaccacgacaccttccttgaagtggtagacgtcttcggcatgcgacaaatcgtcacgcaagccggcgaacccattcacctggtcaccgattacggcaacgtagcctttaagtacttggcgctgcgagacgatggccggcccctggcatggcggcgccgctgtagcggcggaggactcaagaacgtcgtcaccacacgttataaagccatcacggtagccgtggccgtctgtcagacattgcgcactttctggccgcagatctcgcagtacgacctacgaccctacctcacgcagcatcagagccacacgcaccccacggagactcacacgttacataaccttaagctcttttgttatctggtgagcaccgcctggcaccagcgcatcgacacgcagcaggagctgacggccgccgatcgcgtaggaagcggcgagggtggtgacgtaggggaacaaagaccgggccgcggtaccgtgctgcgcctgagtctgcaagagttttgtgtactcatagcagctctgtaccccgagtacatctacaccgtcctcaagtacccggtgcaaatgtcactaccctccctcacagctcacctacatcaggatgtgatacacgcggtagtcaataacacacacaaaatgccccccgaccacctccccgaacaggtcaaggccttctgtatcacccccacccaatggcccgccatgcagctcaataaactgttttgggaaaataaactggtacagcaactgtgccaggtaggcccgcaaaaaagcacaccacccctaggcaagctatggctctacgccatggccacgctggtctttccacaagacatgctgcaatgtctgtggctagaactgaaaccccagtacgccgagacctacgcctcggtgtccgaattggtacagacgttgtttcagattttcacgcaacaatgcgagatggtgaccgaggggtacacgcaaccgcagctccccaccggagagccggtgcttcagatgatccgcgtgcgacaccaggacacaaccaccacagacacaaacacgaccacagagccaggacttttagatgtttttattcaaacagaaaccgccctagactacgcgttgggctcctggcttttcggcatacccgtgtgtctcggcgtgcacgtagccgacctgctgaaaggccaacgtgtactagtagcgcgccacctcgaatacacgtcgcgagaccgcgacttcctccgcatccaacgctcccgggacctcaatctcagtcaactgctccaggacacgtggaccgaaacgccgctggagcactgctggctacaagcccaaatcagacggctacgcgattacctgcgtttccccacccgcttagagtttattcccctagtcatttacaacgcacaggaccacaccgtcgtacgcgtgctgcgaccgccctccacgttcgaacaggaccacagtcggctggtgttggacgaggccttccccaccttcccgctgtatgaccaagatgataactcatccgcggacaacgtcgctgcgtctggcgccgctccaacaccgccggtacctttcaaccgcgtgccagtcaatattcagtttctgcgtgaaaacccgccacccatcgcgcgagttcagcagccgccgcgccgacatcgtcatcgagcggccgcggccgcagacgacgacggacagatagatcacgtacaagacgatacatcaaggacagccgactctgcattagtctctaccgcctttggcgggtccgtctttcaagaaaaccgactgggagaaacaccactatgccgagatgaacttgtggccgtggcgcccggcgccgccagcaccagtttcgcctcgccgcctatcacggtgctcacgcagaacgtcctcagtgctctagaaatactgcggctagtgcgattggacctgcgacaactggcgcaatctgtgcaggacactattcaacacatgcggtttctctatcttttgtaaccgacactgacagtagcgggtaataaaaacaagaggattgttatcgtttttttatgataaaaaaacaacgtgtcattttcacggtgatttattcttgctattatttttccccatgggctgtcagcgtcgggtgcgcgacactgctaccatgcgcaacaggtccagtttaaaggcgcacttgtcgttaaacaggctggacatgcgtgtatatttgctcagcatggtggccagcaccgggtgggtggcctctgagatctcggtcggcaactccaaaacgacgttgacgacgtgacggtgtttttcgtcccgcttgttggccaccgtgggtcccggcgcggtgttagacatggggcaggccgtggggggaggacgaggaggaagtcgctgctaaaccgccacgcgcctgctgcacaatgtggccgccgacgtggcaggcggtctgtttaaccagcgcgcagccccgacacagcggggcgccgtcttcgctttccaaacagctgtcgcggtactcgcccgtctgacagcgcgcgcacagcaggccgtgcccgtgcgaagtgaggcgcaggagacgcgggaccgtcacgccgcgtaccaccacagtggagtcgcaggtgcgtgccgcgcagggcagaatgacgtcgaaagccagccggtgatcgtacacggcgcaagccgcgttgaggcccagcacggctttccagcccacgcgtacgcagcgctgtccaaagagcgtctcggagacgagctcgtagacgcgctgccgcaccacccgctgactgccgcagagcgagcagtgtacgagctcggcgtgcgtgttgaagatgacgctcttttcttgacggtcccgataatagaacatcgagttgagcggaaaattttgctggcagtgtagcttttccttacccaggttgaggcagtgtccgcactgccgacagaccacggccaccagcgagcgcgcgtccagatggcgctcgcacttgagtcgacacagacaccagagcggcaggtcgatgacgctgccgatgaggccgccgcgcagcgcggcgctgagtgcaaagaggacgatcttggtgggctctacgtgacgcgcctgctgtccggcgcccgcgtgtcctaccgccgcagctgccgccgtcgagcctcctccgcgcgtctcgtcgtgcagacccagtgcccgcaacggcaccaggtatcgcggacacgtgtcgcaaaacgtctgcaccgcttgtcgggccagtacgtagagcgggtttccgcagggtaccttcccagcgtgccggcgcaaggctgcgatgaggccccgcagctgcggcgaccgcggctgccgttggtgacaccactggttacggtggtatacggccaaatcagcgcgggcgtcgaagcgcttggcgcgtagtagtgctaggcacggcgagctggtggggtgaagcacgggcagccgaaggtccaccccgaaaaggaaacggtgaaggtcacctagcagcgaggcggtgacaccgtccaacaacgcgtgcagccgctcgggcgggtagagccgcagacggcgcagcaggtagtcggtgtcgtagcgttcgaaacgcagaaaggccatcgtgcggacggccacggtgtgcagacagtccatgctgtagacgtaagcgagaaacacaaagtagggcttggtcataaccatacgctgaaagagcgccgtcaccgcctcccgctcggcctgccgacacaccagccattcgcgcaggaagcgttggtagagacggtcgcccagctcccgattcagaaagcgcttatccgtcacgaagagatgaaggacgcaagaacgtggcacgtgatgcaccagctgctgctggaggaccgccgacgtctgcgccgcaaactgcgccggtggctgcgacgtttctaccgccgcttcctccggctgcagcgcaccgcggccgatcaccagctgcacatggaaatggtcctcgtgaacgcagaggggcgcgaagagacggcgcagagcctggtggaactcatcagtcgcggtgtgcggagcgtgtcggagacgacgactggccatgaccgcgccacagcagagccagcaccagcagaagagccagcaccagcgggcccagagtcgcaaagcgcgcgggcagccacggcccagactgcggtcgcgatggcccggagcgcgctcgccaccacgatgacggtgcccaacgataaccagtccgctccaaggacggcgcgcacggcggagacggcggatgacggtgatgggtcgacacccctcgccgacgactcacgtgctcctccagaggccgacgcgcggaccctccgacgtcctggcccgccgctgccgccgccgccttcccttctcccgccagagccagcaactcctcctcctcttcatcagcgtctccctcgcttgcgcatccgcatcgtcccatacaggcctcacaacgacacagccgccacgaccccgccgccatgggtggcggcggcggccgaggcccggcagcggcgccgccagcggcgaccatggtgggagagcaactcggatgacgaggaggaggaggaggagggggagatgcggtccgagaggaccgctttcccgccgttcgcgtgagcgcggccgacatgcgggcgcgccacagggacggaccgctgccgctgtgactgcttacggtgacgtggttccggaccgccaacgacgtcgacgcggctttcttggcgtacagctcgcgcagcagattctcgtactcgccctcgttttcgggtccgaaggcgatgagctcgatgttgaagaccgacgccgaattggatttgcgcaccacgcacttcgtcagcactccgtaggccgagggcttgatctcctcgatgtccttgagcgtgacgatgagcgactcgttcaccttaagcacattgaactcacctacgtggcgcgccggcgagacgagcttgacgggcgctcgcacaaaacagcagagggagacggcgcagccagtgtttttaaagataaaacaaggcacgtggtctgtgcggctctcccagtagctgagcagatactcgacacaatagaccgtgtctgtcttgagcatggcgtcgcacaccgagtaattgggatttttacagataaggccggcgtcggtgacgcgcagctcgctgggacccaacttgaggatacgccgcgtggcctgcaccagatcctgatggagaaccttgttcatctccatcgcaccgacgccaccgccgatttatttacccggcgccggctcgtcttttccctccaggattccgttaatgtccatgagcttgctgacgatcgccgttaatagttgcgtcttctcacggaggatctctccgtgactgcaggtcgcgcagtcgccgtgcacgtacttgaggaaggcggcgtacttctgacccgcgttcacgaaatttaagcgcgcgtccagggagggcagcaacagatcgtagacgcgcggcagcatcggctcgaactgtaatagcagatcgtcgtcaagatcgggtagcgcgtgcccgtcttcaccgtcctcgtcgtcaccacctcccccctcgagcccaccgctcgtaccagccgcgggctccgcgtcctcgtcgatcaccagcggtcgcgtcggcaccggagaatccacgtcatcctgcacgtcgttttcctcctctccgtcgtcatcgtccagaaacggcacccgctgcttagcccaggacattctttctccgcgtcctcaatcagcggcgccgatcgccatgaatccgagtacccacgtgagcagtaacggcccaacgactcccccccacggggcccacaccacgcttcttcccccgaccagcccggccccgtccaccagctccgtcgccgccgctaccttgtgcagtccgcaacgacaggccgtttcgcgttacagcggctggagcaccgagtacacccagtggcactcggacttgacaactgagctgctatggcacgcgcacccgcgtcaagtacctatggacgaagcgctggccgccgcggcggccgcctcataccaggtgaatcctcaacaccccgccaaccgttaccgtcattacgaattccagacgctcagcctcggcacctcgggggtagacgaactgctcaactgctgtgcggaagaaaccacgtgcggcggcacgcaatccaccgtactcaccaatgcgaccaacaccaccaactgcggcggagccgtcgccagcagtagcaacgcaggacctgccggcgcttcggccgcctgcgacctagatgcggaactggccggcctcgaaacctcggcggccgactttgaacagctgcggcgactgtgcgcgccgctggccatcgacacgcgctgtaacctatgcgccatcatcagcatctgcctcaaacaggactgcgaccaaagctggctcctcgagtacagcttactgtgcttcaagtgcagctacgcaccccgtgcggcgctcagcacgctcatcatcatgtccgagtttacgcatctgctgcagcagcacttttccgacctgcgcatcgacgacctgttccgacaccacgttctcacggtcttcgatttccacctgcactttttcataaatcgttgctttgaaaaacaagtgggcgacgcggttgataacgagaatgtcaccctgaaccatctggccgtggtgcgggccatggtcatgggcgaagacacggtgccttacaacaagcctcggcgccacccgcaacagaagcaaaaaaacaacccttatcacgtcgaagtgccgcaagaactgatcgacaactttctagaacacagctcacccagccgcgaccgcttcgtgcagcttcttttctatatgtgggccggcaccggcgtcatgagcaccacgccactcacggaactcacgcacactaagttcgcgaggctagacgcgttatccacggcctcggaaagagaagacgcaaggatgacgatggaagaagaggaggatgaagaaggggaagaaaaaggaggagacgatccgggccgtcacaacggcagtggcaccagcggggggttcagcgagagcacgctaaagaagaacgtgggtcccatttacctatgtcccgtacccgccttttttaccaaaaaccaaaccagtaccgtgtgtctgctgtgcgaactcatggcctgctcctattacgataacgtcgtcctgcgcgagctgtaccgccgcgtcgtctcgtactgtcagaacaatgtgaagatggtggaccgcattcaactggtattggccgatctgttgcgcgaatgcacgtcgccgctcggcgcggcgcacgaggacgtggcgcgctgtggactcgaagcacccacctcgcccggaggcgactcggactatcacggcctgagcggcgtcgacggcgcactggcgcgacccgacccggtattttgccacgtcctgcgtcaggcgggcgttacgggcatctacaagcactttttctgcgacccgcagtgcgccggcaacatccgcgtcaccaacgaggccgtgctcttcggacgcctgcacccccaccacgtccaggaggtgaaactggccatctgccacgacaattactatataagtcgacttccgcgacgtgtgtggctctgcatcacactcttcaaggcctttcagattacaaaacgcacctacaaaggcaaagtgcacctggcggactttatgcgcgatttcacgcagctgttggagagttgcgacatcaagctggtggaccccacgtacgtgatagacaagtatgtctagcgtgagcggcgtgcgcacgccgcgcgaacgacgctcggccttgcgctccctgctccgcaagcgccgccaacgcgagctggccagcaaagtggcgtcaacggtgaacggcgctacgtcggccaacaaccacggcgaatcgccgtcaccggccgacgcgcgcccgcgcctcacgctgcacgacctgcacgacatcttccgcgagcaccccgaactggagctcaagtatctcaacatgatgaagatggccattacgggcaaagagtccatctgcttacccttcaatttccactcgcatcggcagcacacctgcctcgacatctcgccgtacggcaacgagcaggtctcgcgcatcgcctgcacctcgtgcgaggacaaccgcatcctgcccaccgcctccgacgccatggtggccttcatcaatcagacgtccaacatcatgaaaaatagaaacttttattacgggttctgtaagagcagcgagctactcaagctctccaccaaccagccgcccatcttccaaatttattacctgctgcacgccgctaaccacgacatcgtgccctttatgcacgccgaggacggccggttgcacatgcacgtcatcttcgaaaactccgacgtgcacatcccctgcgactgcatcacgcagatgctcacggcggcgcgcgaagactacagcgtcacgctcaacatcgtgcgcgaccacgtcgttatcagcgtgctgtgtcacgccgtctcggccagcagcgtcaagatcgacgtgactattttgcaacgcaagattgacgagatggacattcccaacgacgtgagcgagtcctttgagcgctacaaagagctcattcaggagctgtgtcagtccagcggcaacaacctatacgaggaggccacgtcatcctacgcgatacggtctcccctaaccgcgtcgccgttgcacgtagtttccaccaacggctgcggcccctcctcctcctcgtcccagtccacgccgcctcatctccacccgccgtcgcaggcgacgcagccccaccactactctcaccaccagtctcagtctcagcagcatcatcaccgtccccagtcaccaccgccgccgctgtttctcaacagcattcgtgcgccttgacactgtacggcagaaaagccggctccaagtgcaagcgccgcggcagcaccatgtgcaaaaacttgtccttgcgcgcggtttcgccgccgggaaagacgggcgacagcacgttggttacagccttgagaacctgctcaaagtacttgtcggtgtgaatgggcacgccgtgctcgcgcacgtagctcggatcttcggctacctcgtagttgcacacggccgacggtggtttccgcgccctcttctttgccggctctcctcctctcctgttgctctcctctaccccgccgccgtcagcgtcgtcgtccgtgccatcaatcgcgtccgaccgggaaaccacgccggcggttacagaatcaccgttgtcggaggaaccctgcggcgccgtccggacaccgggcgccgtcaggacgtaaaagacccgatccccgaccgagggtagctcctcagaacgggccgccagtcgcttaatgacggcaatgtgcggcaggttagattgacggtacaacgagatgtccttagaaagcaccgacgaaagcaccaggtcctcgacacgcacacggtgcaggtacagatcgtcgcgggcctgcaccaggcggcgcaagatacgccagaaaccgcgtggcacgccgtatttcttgacttcatcgagtgagaggcgcgacaggcgcacggctgcttccgagacctcgcgatcctcaaagagcagcgagaggacgtcacgcgtgacgcccttgacgaactcgcaggccgtcttgcgcaccagatccacgcccttcatgctcagacccgaggcgccctccactttgccgatgtaacgtttcttgcagatcatcataagagagacgaagaccttttcaaactccagcttgacgggctccacaaaaagacaggccgtcacgtagtgcgccaggctgggcccacgcgccaccagagcctgcggcgtcaggccacgaaagcggacaaacacgctgtccgtgtccccgtagatgacccgcgcctccacccgccgttcgtccgagccccctgacgatgtttcgagcccctccggtaacgtgctgctctcctccgaatccccctctcgcgttctcactacatagtcttcctgattaaaaaaattgtgcaaaaaacacggctctgaaaaattgtctttgatgaaccgcgccgtgcgctctagcatgtcgcgaccgatgcgcgtgatgctggcggcgatgggcagacacggcatcatgccgttgaccacgccggtaaaaccgtagaaagcgttacacgttactttgagtgccatctgttccttatcgagcagcatacggcgcacggggtcttgacactcgcgcatgcattcgcgcacggcacggcgctgcgaaacccacttgttgagcagttccgaaagcaccgagacgcgcaccgaagcacgcacaaagcggtgagtcacgccgttctctagcgtgacgctgtatacgtcggcggggtccacggggtactcgccacccggcaccagcagggtggagtagcagaggttgtgagccatgatgatggaagggtagaggctggcaaagtcgaacacggccacggggtcgttgtaataacccacctcgggctcaaacaccgtggcaccctggtacgaaaccgccgcagtaccgccggcgccgtgactgtcgttggaaacgccgacgctgccactactgccggagccgacgctgaaaacgccgacgctgctactactgttactgccagagccgggtaaaacgccgtcctgactcgacggcgcagattgcaagggcggcgacatctgaaacatggccgccacagaacccgcgtcgccgggcacggcagcggtagagatgatagcggcgttaggtgacacggcaacgctattcgtttcgggcaccgtcgtacctttgctgtagtggttgggcaggataaaatcgcggcaggcgcactcgtccagcagcgaggtgtagatacggatctgctgtccgtcaaagatgacacgccgcaacggaattttagccagccgcgcgatggccccggcctcgtagtgaaaattaatggtgttgaacagatcgcgcaccaatacggcgtcctgcagacagtaacggcctacctgggcgcggccctcggcattagccacgaaacaacgcgggatgtccttgtaggacaggtcatccttgcgttgccgcaggtaaagctcggccatagtgttgagcttatagttgggcgagttagtcttggccatgcatacggggtacatgtcgataaccaccgaacccgcaatatacaccttggtggcggccgtgctggccggattgttgtgagaagccgagggaaaggcggcggcgtactgccgcttaaaacccacggcggggctgtgtaaaaagaaacggccgccctgcgccgtgggcaacttgcagaagcgctgcgagtccaccttatacaggtactcgaggcgcgtgaggatgtacttcaagtcaaaagagttgatgttgtaaccggtcacaaaggccggcgcgtaccgttgaaagaaaagcataaagcccagcagcagctcgtattcggaagggaactcgtagacgtccacgtctgggcccacctgcccgcaggtgccgatcgtaaagagatgaagacccgagtgcccaaagatcacaccctccgaagtgcagccccgaccatcgttcccgtttgggatcccctgatccacggcggtgtttccccccgtctcgtagcacacgcacgagatctgaatgacaatgtcatcggacttctcggcgcagggaaaaccaccctcgccgctcatgcactcgatatcgaaggacaggcatcgatagcgcggccacgagctgtcgtcgggcacggccaccaggtcagagacatcgcagtcgacctcgatatcacaagtcgacgcgcgaccctgctgccgccagtcgtaacgattcacggagcaccagccgaacgtggtgatccgccgatcgatgaccaaacgcgtcagcggatccacacggacctcgtacacgggaaaaccctgctccagcagatactcgccgatttttctggccatggtccagttgctgatagacacacactgcaaatcgggcacgggtcgcgtcccgtacccgtagatggaggtcttggtggccggcgtgacagacacggcgtatggcgtccgcggctcgggcactagttcgcccacgctggcaatgacctcacgcagcctatcggtgtcgctgtactcacagtaaaagtagctgcgctgcccgaaaacgttgacgcagatactgtagccgtgttctgtggccccgaagaaacgcaacacgttccccgaaggcaccagatgctgacgatagcgcggcgacacgttttcgggcgagtcgaagaagagcacggcgtccgtctgatcgtaggtgtgaaaacgaataggtcccaccacgcgacccaccagggtctcgcgccaaggacacggccaaaccatgtcatgactcaacaaatgtttaatctctcgatagaacatgagaggcagccgtcccgtcttatgcttgatcaaccccgtctgaccgtcgaacatgacgcctcgcggcacgatctgcaaaaactgtttctgtggcggccgcttgcccgagccctgcgcggagccgggctgcgaacgctgacgccggccacccgcgaccgcaccgccggtcacgccgccgctcagatacgggttgaaaaacatagcggaccgtgagaggctgacagcttacgaagcacaatcacaaagaaaatacacatgcagcacctagatatccagtttgaccccgtatatcacaagtctctgtgtcactttttttgtctgttttttttttcttctcctggttcagacgttctcttcttcgtcagagtctttcaagtgtcggtagccgtttttgcgatgtcgcagtcggtctagcaggttgggcttctgtcccttgtcctgcgtgccagtctgtccgtccaaagaatctgtaccgttctgctgcgctcgctgctctgcgtccagacggaccagggccagaagcatctggtaagcctgctcgttggtgtaaggcggagccgccgtggatgcatcagacgacggtggtcccgatcctttgcgaccagaattataaacactttcctcgtaggaaggcggagcctgtaacgacgtgtctttggtgttgcccgacgtcacggtggtcccgttggcggacaccagatagggaaagaggttctgcagcggctgcatgcagagacgccgctgtcgagtatagatcaaataagtgataatgactacggctatggccacgaggatgatggtgaaggctccgaaggggtttttgaggaaggtggcaacgccttcgaccacggaggccaccgcgccacccacggccccaatggctacgccaacggcctttcccgcggcgcccaggccgctcatgaggtcgtccagacccttgaggtagggcggtagcgggtcgactaccttgtcctccacgtactttacccgctgcttgtacgagttgaattcgcgcatgatctcttcgaggtcaaaaacgttgctggaacgcagctctttctgcgagtaaagttccagtaccctgaagtcggtattttccagcgggtcgatatccagggcgatcatgctgtcgacggtggagatactgctgaggtcaatcatgcgtttgaagaggtagtccacgtactcgtaggccgagttcccggcgatgaagatcttgagactgggaagctgacattcctcagtgcggtggttgcccaacaggatttcgttgtcctcgcccagttgaccgtactgcacgtacgagctgttggcgaaattaaagatgaccacgggtcgtgagtagcagcgtcctggcgaatccttcacgttcatatcacgcagcaccttgacgctggtttggttgatggtcacgcagctggccaggcccaagacatcacccatgaaacgcgcggcaatcggtttgttgtagatggccgagagaatggctgacgggttgatcttgctgagttccttgaagacctctaggctgcgccgttgatccacacaccaggcttctgcgatttgcgccagcgcccggttgatgtaaccgcgcaatgtgtcataggtgaactgcagctgggcgtagaccagattgtgcaccgattccatgctggataaatgagttgcattgttgccatctgcacttcttttggttctactatgagtaagattcagactggagcggttggccaaacgttcgagttccaccagagatttttgcttgataccttgccagaacaccaccaaaccaccagtggtttcaaacacggacacgtttccatatttttcatatgtttgattgtatgaagtattgaaaatctgctgtaacttatttatggcctcatcacgtacgcagtccagcgcagagtcggacatgttcacctcttgcttcttagataagaaagtggcggtcattttggcagaagaaaagtgatacgagtcctcggcttcggaacgaatggtgcgttccgaggcttcccagaaagtgagttgacaagtaacattcttctcgtcctgtatatcccaggagatcactgagtccgcacgttcaagaaaagccaccaacctgtgggtctctaacgcagaattcggtcttccaaagtcggagacgatagtgtagttcggaaaaatgaaaaacttgtcggcgttttctccaaaatagctggcattgcgattagttccgttgtagaaaggagaaatgtcaaccacatcacccgtggaagttgcgaaaaaatgatagggatacttggagcgcgcagtagtgatggtcaccatacaattcagattacaggtctcacgatagagccaggtgctgccgcggctgtgccattgatccttgaccgtcacgtaacgggtactgtgggtgttggaataatcgtcgggcattaattgcatggttttgttttcatagctgtccctatgataagccacgaaaaccgtgcctgctataacgcggctgtaggaactgtagcactgactgtggctgttgatatgatgaatctcccacataggaggcgccacgtattccgtgttgctgcccagcagataagtggtgtggatgtaagcgtagctacgacgaaacgtcaaaaccttctggtagactcgtaccttaaaggtgtgcgcgacgatgttgcgtttgtagaccaccatgatgccctcgtccaggtcttcattgataggcttcatcgaggtgcagacgatattacgttcaaagcgaataagatccgtaccctgtgccatagaacacacgcgataggggtacttggtggtattgacccccaccacatctccgtacttgagggtagtgttgtagatggtctcgttaacaccatggctgaccgtttgggaagaagttacgcgttgagagactgaaccggatcgagagtgagcagcagacgtcgtatgagaggaatggtgactgtgagtagcagaagttccacgagaagtagaagatgaggaaaccgcagcacccagacagacgatacacaagttaacgcagactaccaggcaccagatcctggattccatgttcgtcgcgggccaaatccagcagcgatgaggcgcgtcgtggtctcttgcgtgttgcgcggaccctccgggaaacgcccgcggtcgaggaggaggggtacggacttggcagccaaggtcggtccggctccctgaaggcacccgagacggccgcggcggccgttagggtggagggcttggccacgggagctgttggcacgtcgccactctcatccggtctggacagatgcctgtagaggaggagatatagatctttggacttataaagacttccttcgtgacgaagcagcagcggccactctttgttatacgtgagaatcacatctctgtccgggtgcagttcgtcgcgcaggcacgcgatcgagagttgtttcccgaaagtttcattatatagtgcgacggagagcacgagctcccgcacgtgcatccacatctccttctgcagcacgtttaggtcctgacagtccgaaaaattgaaaaaacccatgtacttcaccaccatccactcactgggatacacggtaccttccgcgcatttgaccaaatcgtccttgacgtggggtagtacgcccgcgttgtcgcaggcataggccatgtccacattgtgagagaggggatagcgatcggtacagtgtgtgaagaggggcccgttacacaactcgtagatctgctgacccagtagcgggagggattccacaggcagactcttgtggatcaggttattgaccacatacaggtgctcatcgtacgtgaactgatcccccacgtccaccacgtcttggtcctggtggtattggctgcggtatagaaacccattcatgagcttagagataaagtccagacacaagggccccactaggttgacatcgatgagtttgctagtcagacgctcctgcgttttgatgcaacggatcaccttgccatagcccacctctgagaccttctgcaggtaggcgcgtttgcgcacgttcacctcgcgggtgacgttgtggatgcgggaacgcgcgtccaccaagtcgagagcctcgtgttcgtcgcagttgcgcacccgtaagccgttctcgccgccgtcgccgtcctgcccattcgcccctccccctaccgctttcttgcctcctccacgggcccggccgccgccaccgttattcctctgactgtgagtactgctgttgctgctgttgctggccgtcatcaaagtcgtacccgtccccgacatcgcctcccgtccacgcaggtgaatagcctcgccctcggggccgtcgccccccgtgccatcgggcagcggacgtcgaatctcctcgagaatatgcttgattttggtgtacatctcgttgctttcgtggagcttgttgaacaccgggttgtcctcgaaagcttgaatgctgagggatgtgatgaggtcgatgatcctgttgggggcggcaaagaccgaccccacgaacatgcgctcctccccgtccaacgccttttccccgagcacgaagatgtcctccacgtcctccccgtacagatggcgactgatgccgttcatgagcgcccggcacagctggtgatacacatttagctgctggatggtgatgcccacccgcttgacgataacctccgaggtacgggaccagtaggtaaaatccgacaaggaatatattcgttccggtatatccgtaaacaggttgtactccctcagcgcctcctccgcctcctggatgtagctgtggtaggccgatgaagaagagaataggcttttgagggccgaaaggactccagccaagtgggggatgcgcgttgtcaggtccagcaggtcctgctccaccgtctggatattcacatcggactggcttgacggacggtggaccgctatatggttgcacagcaagccctgcagccgcttgttcagcgagcggccctgattcgggatgatggtcagctcctcgtagcattgggcgcatgtcgtcccttcgacgtacacttcctgacgcgccaccggcgagatgccgcataggcgacggaggagctccagcagctgcgcgcagacctccaggccggcctccggcgccaggatcccgtacacgtagttcattttgcacaggaagcgctcgatgtcgttgagtgtggccagactgacgctgaaacggacgttgtccgtaaactggagctccacggtgtgatggcgatcgcagcgatccaaacggaggacggtacggtagaaggccgcccggtccggctggcgcgagtaggccatcagcgcccgatccagcaaagccgtatcctcgtgcagcgccttcagcagcatctccagatagagcgtcagcagcgaactctgcgtacgattctgcgccaccacctccgggtagatcttccggtacagatacactatagccgccgcgtttctcttgaacggcgtggactccgccagtaacacgttcggatcgcagtactttagacactccagctccatggcgtattcgttgcatttcgaacacactacgcatagtttctgtaacaaattcatctccatgactcgactcgctcacgtacgagacgctgtcgtccggtctggcgccggccagagacatggagtcggtgcacaaataactcgcgggccgctcgctatgccgactgacgttgacgttaatatataacgacgtcgtcgacgacgcgggttctgctcccgaagctgttgccgccgcttgcggcgcaacctcctccaccaccgccgccgccggctcctccgcctcgggcgacgggggctcggagatgaccggctgtgtctgacactcctccccttcctcaggcggcccgggcgccgacgcgaatgtcggagtttgccagcgcggcggcggtctctgtctctggtgccgcggcgctaaccttcggggctgttgctgctgttgatgatgcgacgccgtctgtcgccgctgttgcggcggtagctgatacggtgtcgcctggtgctgctgtgtcggtggctgctgttgctgctgttgttgcggtctgaaaagcggccacgggggctgcgactgttgctgctgttgttgcgatgctcgtggctgcggcggccgttgtcgcggcgtttgctggcggttacaaccggctgcgtttggccggcaataacccgctgcccccgccgcccccgctgctcccgccgacgccgccagcctcgtcttcgccggcgttcacgagaaagcagccacctcccgtctcgccgggcacgccgaagcaaatggagttgcccgcgacggactcgccgagaagaagaccgccacccccgacgccggacgccgcgccgacgccactgggcgcgaagagcgccgacaggtcgtgcacctcccccccggcggcgtccgttaatcgctgggcgtcggcgtccagcacgcgtcgcaagttctccagcgaaaagtcctccacgccctgctcctgcaacgcggcaaacttgtccatcagcgacgcggccagcgcctcgcagccatccacgaagaagagcacatcgtcggacgcggggatctcctcgcgcacgctcagaatctcgtacacggccatcacttcggggtcgcaatccaagttctcggcgtccagcgccagcatgacgcggttttttataagatccgcgtcaaaaagcacgttctcgcggcgcgagcgtttgatgagcacgtcggccagacgcgtagccaagaggtagcgctggcgcatgaaacgataatcttggccgctcatagagctcacgttaaggctgcgttccacaccgttgcccgaaaagtagccgatctgcccaaactgatagatctccttgctgttgttgatacccgcatacttttccacgctcacgggcacggtcaccaaggaacgatgctcaaaaacgctccgtaccaacgattcacgcgccacagtggcggccatgggcgccggcacgcctgcggtcttcaagcccttgacatgcaacgcaaattcggcgggcgacgagaaacgcggactagcacctaacacgtgaggaaactgcgcgtggttctgcgtcgttaagcgcgtcgtcaacccgtgcagcgagccaatgtagtctttgaagccgtagtagcagaggaatttgttatggaaacggctttccacgtaactcagcacacagtctggcgccacatccagcagatcgtgctcctgatagtcagccgtcacagccaccagaaatttgacgaaagcattgaactcgcccatgtcacctatgggcacattcttgggcaacgcgttggaacagaccttctgccaaaactgtaagcaggggagaccacattcaggaaagagtcgctcgtgatgtcgatacagcagaaatcccaagcagcccttagccggattacgacgcggaacgtgatcgcggcgaaaaaacacgctacccgcgttgcccttgcccgcgcggtagatgggtcggtttttcactcgcaccatgatcaacgtgggtaccgacagccgcgagagcttgatctccatgggcaccacggcgtacgtgccctgcgcgtacagcctaaagtccagcaggcggtcgtgatccgaattcttggacgacttgatctgcttggtgaagagaaagcccttgcgcgacgacgtggtggagaacgcgccgtgaatggattgaaaatgctgcgtcatccatttggataccaagttggtggtcaacggattgtccacaatgtatgaggtagcggtaataagcgccacgttctggatcacgtaaaagacggatctgaaataggcgtaggccagcagcggctggaaggccacggcgtagggattcagatccaggttgaaggcctgcgtggcgcccgccacctcgtcgcggctgctcttgaggcgcacctccgaaacgaaacccagggcctcgtcgtccacaaacttgttgagcgccgaaaagacggccacaaagtcgcttttgccgtgcgcgctaaaggtatcctcgcccgtcacggggtcgatgagccgcatcttgcggcagtaatccaagatgcgattgagccgataggtacggtccacgctagcgcccagcatgcgaccgccgcgccccatcattcccccggaatccccgccacccccaccaccacgaccgccgcccagaccgtcgctcgggcccccgctcacgtcccgtccaccacccccgccagcaccgccgcccggaaccccgtcgtcacctttgccgtccaaacccccgtccttggcgtcgacgttgtaacgccgaccgaagctgcccaaaatatccacgtcgttgagaaaacgcgactgcacggtgatcacgcagggctccttcttgggctgcttgggcaccacgggcaagcgggtgcgcacccgcacgaaggccgtctgataacacgtgtggcaacaagtacccccacaggcctcgcacagccccgcggcgcagcccaccaggtgattcgtgagcgtcgacgaacccgacaagcccgtgttatacaccgagacacgatttagataccagacgaagcccgaaactagctgcggacacgtgccacacaccaacgccaaatgctgcggcccatagcgttcgtccttgagcggcgcgccttgaaatttgagcaccttgcgcgcgtcgttgtagacgtcttcgcaggccgccgacaacccgttggtgaactgaatagccttgagcaacgtctcctgactggccgtaccgccggcgctgggatgccgcgccgacgactggagatacaccagcctgtgctggtagagcaccgaattagcgctgaagaccaaggcggccacgtgcgtcgagagatgcaacttgagctcggtcagcgcgcggatcagatcgcggtgatcggttgcgttggtcactaaaggccactcggaaaagagcatagactcggcaggttggtaggccgaatcgaaaaataccgaggcaaaactgaaggccaactcgcaaaccaccgcgtcactcagcatcagatgatccttttccagactgctgagtcgctggctcatgtaccccaagtagcgcttatgtggcgccagcttcaccgactgctgactgtcgtgcacaaactgccgcaacgccgcctcgatcagcacacgcggctccgagaagcgcagcgattgacaccatgacgtgtacacgtagtagaaaagcgtctcgcttacggccggcacgtagagccctcgcgcctccacaaaagcgctgcgcgcatccagcgagacctcgtcggcttcggcgtcaagctgcagcgaattaaagagcgtaggcgggtacaacggcacgcgcaccgcctcgccgccgtacagtcgcaccgtggtcgcctcctccacgcatggaatcagctgaccggcaaagagaaactccttcaagccgttgcccaccaccacgtgcacagtcgtctcggacgcctgacagcccaccgccgcgcacaacgccgacagatcggtaggcacgcgatccgcctcgggcgtgtaggcctccaacgcgtacttctggcgggcgtcctcgcacaaccgatgcacgtctccgtgatcctcggtaaaagccacgatgccttgcgtatgatgaaagtagagcgcaaaaggacagaaggacgtgactttcgtgagcaccccgccgtcgtaacaaagcacaggcgtgcgcacagagacgccgaaatccgcctccaccgtcagccccgccaacagaggagcgatcaccacgctcgaggaacggtcgcatagcgagagagtggccagaatctcctgcgtttctgcgttcaacctgctgaagtagagaaaagccgcgggccccaccggcgctagcgcggttagttcctcgtggctcatggtggatgaacggaagacaatggctacgccgccactgagtgaattttataccaaggaaaagttcagcacgtcatgtttgacgcacgacgtctgatacaccaccgtggccaccactgcggtctggctgcggttgcggaccaccaaaggcgacaaccgcaacgatcccagcaattcgtaagaaaagctaaccgttacggtcgggcagcctctcgcagccagaccgctagccgacgcacccgcccgcgaaaatagcgtgatgttcgggacggcttcgcgtcaccgcaaactaacgtcggtagtcgcgcacgtcgtttatcctcagcacaccgtccgatcacaacccgttttcccactcagtcgcacaagcagcacataaaaaccccacacagtgcacgtgaaaacaacgtccctagaaaacggtgttttctgtcctaccgtcaccgggccacacaggcaaatcccgagcccgatccccgaaaacaccgtacggtgtttgtggcctccaaaatcacatcagataacaaaccgtgaaaagtcacgtttcacgaacacggtgtttttaaatcacaaagaaccacctgacggtttacaagcagaaacaccgcaccacggtggtacaagcgcggtggatctggtctcgcaacctcaatcgccgctatcaccaccgactttcgctgcgctccgccgacaaaacgccgtataagctacacaccccaaaaacccgcacgcctatgggcgccaaacgtgtgtattatctcaacgtcacgacacgacacaaacagcgtaacgtggtttcccgaacacgtacgcggcacagacccccgacacgtactcgaagaccttacagtttacgagtcaataaaacaggaaaagatccgaactttaaaattgtgtatttttattttcccatccccctctttttaccaaaaaacacatttttcgtcttgtaaaaagtaactttcgcccattgccatgaaacaccgtgatggggaacggtgttgtgtgtcgactgacgtcactacggcgatcagtatcgacgtcgtgtatacataacggtgcccggtgtttttattcggggcgttgtcgcgtcttgatgtaatgtaacctgaaaccgccgtgtccaagaatgcggaagccagcgtgtaatcataacggggttttgggtacaatctgacgacatctggcggcgagcgtacaccatcgaatgtggcgatcgccggctctacgtcacaatgacgcaaaaacacactgtaaaacacgcgtagacagctttcctggtcaacgagcgccatctggtgtcggcataagaacaggcatcaaccccgtggccggcgaggcggtgagcacttttgctggtcacgtgaccatcagcgcaggaagcgaggcccgtagaaccgcccaagaggcggtgccagatgccaacgtcataatcacaaggtgatttgttacgtcacgcgcgcgcacgcacgcgcgcgcggtagaatacagcgatccctagtgaagccacacccattacgtgtagccatatccgcttacgtatacagccacacccctaggtacgccaccttatctaccaatcatagaaacggatatacaatgacccctccctagactccaccccttgtacggaaatttcagataggtggaacccgttagggttccaccgtcctcggtgtacgtacaggcttctccgtctaccggaaatatacacctgctgacgtagacgctactcccggatacgcgtcataagctactggaccctaggggggagtgtctacagggctacgtgcacgcccccttacttagggtatccgcccccttcctctgttttggcctagtaaacttaacgccgccgcttctcacgtgacccctggcaagcctacgtcacactcgcgtgaccacacccactccggatatacgtcatcctgtggaattccggacatacggtgacgtagcgagcgtagcgagctacgtcacgtatgcgtacgtcacctccggcggaaatcatctctgatgacgtagcgagcgaagcgagctacgtcatcagtccgttttacgtataccgggtgctaggcgacgccccgtaggggcggagcctagcttccacccctaggatgcataccctatatagcataattcttctaacgaaacgttctacgaaaacggactggcggaacgggaaccaccgtaacccccccccctcacccccccccttctcctccggaaccggggggggcaaatttttaccaaatttgggcaaccatgttttccaatgggacggcgtttccgtgcgcatgcgcagtcggggcgaatttttggttgtcagggcgttgccacgcggattatgggatgggggctcgagtgcgcatgcgccggggatgccgcatggaaagcctatatataaggaggggtgaaccaggggccccggtgcgcatgcgcggaccaggccccgcgggagggtcgccctgcgcatgcgccggtaaaattccactgggtgtgtgtcgtgcgcatgcgccagtatttttccactggaggcggtcagtgcgcatgcgtcggtaaaattccactggatgtgcaccgtgcgcatgcgccggtatttttccactgggcggccgcacctagggagcgcgagccccgtgccgggcatgggccgcggcggtggaaaattaccgctccgcccacctaggcggggcatcttaaaacctataaaacccggcgtacccgccgccccccggcgcagtccgcggcagggttccggccgtgctgcggtccgcacgctgcgcccgctcccgcctgcctcccgccctaccccccaccctccccggccgaggcccggcgccggtccgtccgcgggcccgtcccaccgccctggagcaccatccggggccgtgggccgggcaccgggcgcggcccgctccggacctcggccgggggtccctcccctccccccgctcgacccccccatccgacggcccggccgggctgggacccccgcaccggggtcccggttcccgtccgcggcccggggggacccgagcgggggcttcccacccccaccccgctcctccccgggctccggcccgggatccctcgctgctcccggcgacctccgccggcttcccggtccacccgccgcggaacggacgggacccggggtccgcgcccttcccctccccccacggggggctgggtcacggaccccggttcctaggctcgttccgcggtgggcgaccggggatcccccacccagctccccttcccggcccgccccgctggcttttgggcccctccgggctttttttccggctgggggtcgcggcgctcggccgacgacgacggtaggtgggccgggtggacggtggtggggacgggcgacgccccggctcgacggcagtcggtcccggaaggttgggggctgggggcccggtcaggagctccgggagcggggtcgaccgcgacggcttccgggtctcgcggcggctccctctcggcggctccggttgggctcccctcccccctctcgagggtccggccgccagtcgtgaccgggggtccctcggcctagccgccggctctcggtccgccttatcctgggcgttggccggtcccgtgacgctcccctcccccgctgctccccaaaaaactccgcccgaaccgtcgcggcttgctggccctgggcgtggtcccccactcccctccccccatcggccgcccagccggggtcggcgcctcggaccccaccaggctgtggcgtgtgtgctggccgatgcggcggcgaggttgggtgtggccggaagcgctcggggtcgacggtgggccgtcatgacacctcaattgccgtcagtacgcccctccacaatcaccgtccctacacgatgggcccggcaggtcacccaacgttggttcaggcccagtcgggtttttccccggcacaaacgcacgtccccgtgggctccacgcgttttccaccctttcctggaggggtccggaacaccgtgaatccgcggggagggtctcggcacgggccgaggagaccacgaccgtcccacccggcgtgtcgacccgtccgagacccgggaagggaacaggccccacccttttttttcccttctccgatttgccgtggaaaacccgtgaaccgatacgggtacagacggccgaaaaaattcgagacgacaatacgacggcagggcgtgattttcttccccatccgacaaaaccgtgtccctcaaaattccccacctttctctgttcaaatggccccgaaactgtaaaacaccgttcgaccgcaccccaaccggcgccatcttggtgaccttctcgacggttctctcgctcgtcatgccgttctgagctccgacatggcggacgagagaaaatggcgtcgagagcataggagcgttttcgctccaggcgggtaaaagaatagcacgataacttttctgtgctttttttgagacgttttagaagagctttttttctgctcagagcgaaaaaatgatagccctgaaaatctcgacgagtctggccgagcggcgccatcttggaggaggggcgagtcgcgggcaccgcctcggtaccccctggccgaggcgagtccgcggtcgccgcctgttccgtgatgctacctagagggcgccgtcgaggcgactcttcctgttttcgccctgagggctaacggtcgctgacgtcaaaccatctcgtgctcgctgagtcacatccggttgttgacaagcgatggaggaccgcacccaaagtgcgccctctagtcatcgcgcctgaccccttttataaactgctcgaagaaaagaacaccttatgtgaaaaaatacagaatgatgacaagttcatccaacacaaccgctcaacaacgccatatctatcagtgtccaaaaactatcttctatcctttgaaactataaatgctgcctatatacatatttagtatccaagactcttaccacgtagacgaaaagaagtgatacaatgatcttgacgtgtatcgtctatatcgtgctagatatattcagataagacgcgcaaaccatagatttctcatcagtatcatgaaagacctatagctctatatacgaacctagtcattttaggacagccgccggagaagccgacgagggatcgggcgggtgcagccagaacctcacgcccgatcccgcctccggtaggcgatttgcatctgtttggtaaaaagctcataagtctgtatgtgacctatatatatattatacgctatgtacaccgaactgtcgctgttgtataagaagaaaaaactctccatatttatatcgtctgaatttttgcttgatagacacgtgtttggaactctgtccccccacgttttcactgtgtataacaaaaatatgtgtttctcaaaagatcttgaggtgtttgaaaacgggggaaacccgcgtttgggtgcgctaagccccggactgggacgtagccggcgtccggcacctatatttttctattttttttacaaaatatatgatgaaccaagaataaaactctagctctcgtctatttttaatatgctctacttagaacctttttaatgacagaatgaactccatgttatacgctctttatatagtttctctgcactaacctttaaaatcgtatccttccctgttgtacaaatcatcttttgatacacaatgatgacctgatatccctccatatatatgatcggatattattccgttagacttgtcctccttttttttcctcatctcctgtatctggagatatatgttgaccaccaccgccatgaccaccaaaaagctagccgtcacgactagaaatgtgtaggattcggactttccgttcgagaagaaagagaccgcgtctctggacgctctttttgtcggtctgaatcgacccgggatacgtaagagagcggccctacatcggggggcgctcgagaccgacgacgttccatctgaccagaaaaaaaaaaggcacccctcggtagcgacctctcaccatcgtttgcccgtccgcccgtccttcgtagccatcatcatcatctcaggctctatcggtaccatcgttgtcatctgaaaaaaaaaaactgcctcacccacctgcgtaaaaacaccatctttccggaggtgcggtaagacgggcaaatacggtcgtgccgaggcaaaaaaacgcaccatcgacaccacaccctcatgagcaccacctgtcggtgttggtcgtcctccatcgttctctacgaacatctcgacgcccgggtgacggacgacggcaagacgtcccggagaagacggtgttctctcgggcggtacgctctctggatctataatatctatagtagctaaacgagactgtgagtacgacgaaccacatcatcttttttttatgttgctcctttagaaaatgacttatgtcgacgacactcggcatcagccatctcgtgaaacacgctcgcttttcgtctctccaaggaacactgggtccgctgaaagggaccgtgtaccgaccaaagcaaaaaacacacacgtagtaacatgatcaaccacgtctgaatgacacgaaaacacaatcgtataacgctctattcatggaacgaacttggaataaaaaaaccatcgcaggccagaggctaagccgaaaccgtccggggaagcgggcgcgagttttccgacttagtctctggtgctcgttgagcctctttttttttcctgattctctgaagaatcaccgtcacagccctatgacgcgaaatcaattgctagaacataaacgttctcaacaggtatgaaatgaacaaactagatgatgctataaccttatattgtgtgtatatagataggtgtgaaatttgtaggataaaaagtgtcgttgtatgatgcacaacgatcgtgaaactggagactgtagctctctaccgaatgcaaatacacaaatgacatcgattcccgtccccacataaagaaatgtgctttactgtgaaagaatgaagaagattcttgttcctcgtacgacggggccctcgctcgtcgtacctcttcccccctccgggagaggggacgtcggggccctccgtcgcaccgggccgaagccagtgaaatgtttactacactgtcatcagaatatatgatgtatattatttcctccaaactcctcaccatagccaccaattcgcatcacttaagaaagtagtagcaaccgcggcggcggcgaccggccggtcgtcgtctcctcgtcctcaaatgttgtacatgtgcagaaaaatgtgtaaatacgtgttatttatcccatgcgtcttgtacatagatatatgtttttatatacgctatttatactttatatatccttttgcataaccatagacagtcaaggattttaatgatttgctcatccgcctttgagccatcgcttaggagttagttcctctatgttctcggcccaccttttcgactacagtagcaaacccttgtactaccaccccgataaaaaccacatcatcatcgtcaccacgacctggaaacgacacacgttcccccccaatcttgggcatgtgtatatatataaagaatgggagggagaggacgtggggctcgagaagaaataaacgccaagctcgattcgaaccaaaaaaccacatgtgtattgtgctttttttgtttttacggtggggaaaaggagggggccgtcattaacgaaaaccgtgtatggggtccggacacgaacagtacacagcttatggggaaaaaagctcacagagagaaaaaaacaccaagctcaggcacgcgtacatcattatcatcatcggatatctcaccacgagtcatagtagtaccaaggagtgtgtaacaccattttttcttttttctttgtaacgggataagggacagcaatcatcacgcacaacacccttcactctctttttagtcatccatatcatcgctgtaacacagcatgtcctcgtaatcgggcgtctggcagcgcattaccaccgagtcgtcttcttgcggtaccggtggtggcggcggcggcggcggctgctgctgggttaccgtcgtactgtgattaccgttggcggactgcaccgggatgataggctgcttgtggggaacctggggtggactgccgccgtgagaaggcgacggcgtcatcaagttaagctcaccacggtgactccggacaccggcgaggggccccgggggactgggagggaccgcggtcgtcttgtagacgacggtgtccccgtgtcgatccgtggctcgtaccagatcttgactgctagcgtcgtcactgtcttcgtcctcttccagctcgccctcagagtagtgctgctgcggttgcgacggtggctgggcgggaggagcggcggcgatcattggagagggatgtcgatgactcccttctctgtcctttttatcgtaggctgtcagcgttgctgggtccgtcctgctttccatatttgcgcattgctcatcggtgggatgaatttggtctcctccccgctgttgtccgccggcagtggcgtggttgctggcggttgtcgttgtcgtaccggcaaagacggtgagatccaatagtgactgctcgtcgaagggacagtacgctatcatgaaacgatagggtgccaacgcgcgttggatgcgcagttcgcacatctcgttctgacactcgtggcactgcagggcgcctaggatcaggtccgagacagcgccgcagcggtaggtacccatggcgttgttagtatcgaactggtcaaaaaattggggcgtaccggtgacttgcaacgcgcgacggcgtagcgagacggccacgcgcgagaaagagcacacgtaggccatggcgcggtgcatgggttgcgagaaggtctcgggcggacgcttctgcagatcgcagacgtcgtcgcgtagccaggcgctcatttgacctggctttttgactagccgtttgagcgtgctgcaatggtcgccccagccgtcctggtggtccaggatgcagcccaggtccaggttgttgagtttgttgaagagcagctgacgcatgccgcccaccgtctccagatagggatcgtgcgggttgacgggtagcccgtgcaggtggtggtacttcatgtagctgagcgtttcgtcgatgatggccagcaacgtgtgcaagttgggagcgttgtacacggcgaagatcttttccaccaccagcttgcgcagcaacggttcctccagccaatcgaactgttgacggatgtgcaacaggtagtcggtgtgcatgagctcgtcgtgtgacagcaggatgcgaccgcgcggctgatgatcttgcgggaaggcggtggggaccttgagatcggcggggtagggtgccagacgtagactctcggccgtgtagcgctgaaggtcgtagacgggcgaggtagaactcggtgaggtacccgacgaggcggcgccgcgctgcagacgcgctcttttcttcttttcgatcaaacggctgagttgctgtagttcgtcctcgtccatggcgtccagttcgtcgtcaataagcgccagcatctgttgttgttgcggtccggtggacgatccgtgatgattattggctgaagaggggtgagaagaaccgaaagtcgtaggacaactgggaactcggcgacgaagatgcgtcgaatcgccgccgtgatggtgcggttcgccgtcatcgttgtcgtaagacttaccgtagtgggggttaaggggcaccgaggcggacgcggccacgcgtcgcttgaaagaggaggacgccctatgtccgccacggaagcccgcggtgcccatgatgatgtgtccgccggtgcccccgagtgcgtggcgggaggagggtggaaggggaggaggatagtggtccggatcgccttcggtatcatcgtctttgctgtagcggggtcgtcgtgcggggacgcagggtcggtgatgatgcgaggcggcgccgacggtatcttccgcgagatggtattcgctggcggctgctccgttccgtgtcgacggcgaggttggacttcgctcgcgtcggaacttccgtggcacgggttcgtaatctagacagaagcgccgtgcgcgacgggcgcggcgttcgcgctcgctcagggaagataacgacggagcgtcgtgacggccgcgtgagtgcagctccatggccgccgtcgctaggaaggtcacgttcgggcacgctgatgtatatatagatgagaccgctgccggggggcgggtcaccggcgccgtggaaagtgaggctcagacggcggtcgccggcggcatgggcgcgtcgggcggtctgattttgatggaaatgtggacgtttttggcgttggagtgacactttttggtgaaacagcggctccagaggctggcccagagcgcgtagctgtgctcggtgcgcaggtcgatgaacacctgcacggtctcttgcgggttgcggtgcgtgtagttgagacagcgaaaatcccgcgtgcgcgcgccgtcgcgccgcttgacggccacgcagcaggcgccgtggggctgaaagaggaggacgtggggtgcggtaaactgctcgctgacgtgcggctcgtagtgttgcgtgaggtgctcgagcagcggcggccacacgcgggtgacgacgagccgctgcaagtccgtgtcggaaatcgcagcggcagtggcgccgtcgccaccgtacaggtgataggcgagcacctcggtgagaccgcggcgtcgataacgcgtcacgttaagcgagcgcgtctcgataaagttggcttcggtcgaggggcagattttgtcgcgcacgctgagaatgacgcgtggcggcggcgacaggggcaacgcgggcaggtcgtgcggcgggtggtggtgaagcaggttacgcagatccagttgggcgcgcacaaagcctagcgggtgttcgcggtaggcgtcgggcacgatgaacagcggcaacagacggcgatgcatgaaatagccgtcgtcttggtccattttatacatgtagggcagacgtacagagcgtccatggtggtagatgcctgtgtctaggctgctctcgggatgcgagatggggtccagcagcgtgtgcagttcggcgtcgagacagacggcgtgattgagcacctgcgccacggcgcgtaaaacgctggggtgtacggctacggtgcaggcggggaacggcgtgatgatgcgcagccccagtttgcccttgcagcggcagtaagggggtgacgtgtcaacggaggacgttggtttttgaaaaacgccgttatcagggacgttatttttgtcctctttcccgtcttcgtcttcctctgtgtcgcgctcgtcccggtaatcgagatagtcgtcgtcatcgaaaggcgcgccggccgcgtccacgggcacgctgttgggtgggcacgcgcttttgaagaaatagaccgggtgccggtcggggtgcgtgtagccaaagaggctcgcccatacggtcatccagacgcgtcgtagtccgcgacataattcaaagacggtgtgtcgcgccagaccggagacgccgtcgcgcagtcgtaaatcaaagtcggccacaaaattgaagacgggcagacgttcgttgaagacttcgtgtcgcgtgtagtagaactgtgtctcggggctggtgctggccacgtcgtcgtcgtgtagccacacggtctcggtcagggcctcgtccgagaaacggctgtcgggtacgtgacggagcaggtcgcgcggaaagaggctgcgatgccaggtttcggaggccacggcgcagaagacgtgctggtcattgggcaggtgtacgcggtagacgggcagcggtcgctccagcagcggtgccagcgcgggctcgggtagcaggtagcgacgttgcgagtaacgcgttagcgtgccggtggtgtaggtctgggctgtgcgcagcgaggcgcatagacgtaacaagccggacagggagcgttccagtggcgagaagacagactcggaaagcgtgttgatgcgttcgagctggcgcgccagctgcgtggaggtgccaaagaagcccgccaggtgcgtgccgtcgatgcggccgccgtagccggccagccccaggccgtgcgggctggtcgccgagtggggggattcgtcgagacccagtaggtgcgtctccacgtagtcgtgcagaaagttgtcgagcgagaagtatttttgcatgacgtccagcagctcggtggaaagccggcggcccagaaaacccggttcgcgcgtgcactgcgcttcgggcgccgcgtcagcgtcgtaagccaccacgcgccggtactcgagcaaccgcgcgcgtgccagcgccgtgcggtaggccaggtagacgtagtgcacgcagaccgtgtcgggcagacgcgcacgttcgcggaacgcgttgatctgcgtgtccacctgctctagctcggtgtagtcgcggcggttgcgcgccacggcgtacgccacgaaagcggacacgcgctgacggaagggcgagcccagtagcagacgcgcgaactcgcccatggaggcgtgcgtggggatgatggtgcccaggtcgcgcgtgcagaagctgcgcacgtactcctccacggtggagatggtgctgtactggccctcgaataggtagtaggccatggtcagcagcacctggccctcggtgtgcccgaagacgctgatgaaccacgagggcgaggtggggcagaggaagacctggttgagatgacgtagcacggccgcgtggtgaaagtacaccaggtgcttgaattcgcgcacctcgccgccgtgttcgggcgagagcacgggcgtgcggaagagatgccggtagagcggttgcgtctcggcctcgtccagactggcgatgagcgccgagagggggatgggctggcgcgcggccaggtagcgcgagagctgcagcgtttcgttgttcacggcgaagacgggcgccacccgccgcgagtccgagcacttttgcgtttgtaggcagaaataaacacgtcgcgagacctggtgtttgaccagcagggggaagacgcagtggtccgtcggtgtctgcgagagtacgttggcgactatatgagcagaatcatactctgttgcgaacagaacgagcgtcatcgtcgcgccggcacgatgcagctggcccagcgcctgtgcgagctgctgatgtgccgtcgcaaagccgcgcctgtggccgattacgtgctgctgcagcctagcgaggacgtggagctgcgcgagctgcaggcgtttctggacgagaactttaagcagctggagatcaccccggccgacctgcgaaccttttctcgcgacacggacgtggtgaaccacctgctgaagctgctgccgctctataggcaatgccagagcaagtgcgcgttcctcaagggctatctctcggagggctgtttgcctcacacgcggccggcggccgaggtggagtgcaagaaatcgcagcgtatcctagaggccctggacattctcatcctcaaactggtggtgggcgagtttgccatgtccgaggccgacagcctggagatgttgctggacaagttctccacggatcaggcctcgctggtggaggtgcagcgcgttatgggcctggtggacatggactgcgagaaaagcgcgtacatgctcgaggccggcgcggctgcgacggttgcaccaccgacgccaccggcggtcgttcagggggaaagcggcgtccgcgaggacggggaaacggtcgccgccgtgtcggcctttgcctgtccctcggtttcggactcgctgatccccgaggaaacgggggtcacgcgtcctatgatgagtttggctcacattaacaccgtctcctgtcccaccgttatgaggttcgaccagcggctgctggaagagggcgacgaggaggatgaagtgaccgtgatgtcgccgtcacccgagcccgtgcaacagcagccgccggtcgagcccgtgcagcagcagccccagggacgcgggtctcaccgtcggcgttacaaggagtcggcgccgcaggagacgctgcctacgaatcacgaacgcgagattttggatctcatgcgacacagccccgacgtgcctcgggaggcggtgatgtcaccgaccatggtcaccatacctcctccccagataccctttgtgggttccgcgcgtgaactcaggggcgtgaagaaaaagaaacccacggcggcggccttgctgtcctccgcgtgaacagcctggcacgttttggaaaacgtacgtgatcacggacacgacgagcacggggtttctcatagacgtactttattaggtcagggatgacggggaggtttcgggccgacgtcaaaaataacgtcactcgtgttgacagggctttctgcgtcggagctcttttcatcttcttctgtctcgtcgacgtcatcgtctaccggcgagggtgtccgttgcagcaacgcgtgctcgggcgtgtgggtgaaaccgatgtcgggggtgggcggcacgatcatctgtcctagggggtgactgcccaccggcagataggtaaagcggtgggtggtaaaaaccgctttggctacggtggtgtgtggggagatgcagacggtggtgtgcgaagtgttgaccaccgtcacgccggccgcggtacccgggagccagatggtgggtcgaatgatgagatccgattgactaaactggcgcacgcccactatgagggcgcagataccgggcgcgtgcacgtaggccgcgtcaaaatagacggtttgcgtgtgacccggaccgatcaccagcgtctgacgggtacgtaatgaaaagaaacggtgttcgttgggcggcggcaagttcatgagctgccagggttctggcacaaaacaggggaaaacgccgatatcgccttcgatggtgcccggaaagatggactgaaaagtgtcgttgaggttgacgacatccaactgcgggacttgcagcccggattccagcagctcgggcatgcaaacgaattgcgcgtccaggcatttgtaaaaggtaatgccaaaaaaaccttcggggatatagaggctgactcccagcgaggtgggcactttgcgctcgcgtgatagccaaatgatgtgtttattgtaaaaagccagctgcgtgtggcattgtttaacgatgaaactggaaggcatccacttgtagggaactttgagcggcgacggtaatggcgacgacgcttcatcctctcccggatgctgctctttgtcgtatttctcctcggtcgattggggcagcgtaaatgtggtttgaaaatcgctatcgctagcgaaacgcacgcagtaacgcatgttgacggatttctcggctaggatgatggagcctgatgacggtgcggactcttccttcattattaacgtaggggtctcccagaatcgctgaaaacgggagcgcggcagccgcgacagtaccagttgagagtcgattctgtcggtcaacattgtaagcatcgtggcggtggtgtgatggagtggaaaacagtgatactaggtgtttttgttttatcggtggcagcggggagttctggtaacagctcatccacgtcaacctccgcaactacgttaaaatcgtccagttctagcgtgtcaacaagcaaattgacgacaactgcgacaactacgacaactacgatgagtacgacctcatcgacaactaccactaaaccaagttccactactcacgaccctaatgtgatgaaacgacatactcacgatgatttttacaaggcacattgtacatcgcatatgtatgagctttcactgtccagcttcgcggcttggtggactatgcttaacgctctcattctcatgggagctttttgtatcgtattacgacattgctgtttccagaactttactgcaaccaccaccaaaggctattaagggtggacagatttacagctcgacggtgttccggcggggtaaggtttccataagtgggtgactggagactaaagttacggatctcatctagaaatagcagcgagtctagatagtcccacaggggatctataaacgttctctgaaatcccgttgatggtgacgtaggtgtagtttcggaagccgttttgttttccacgaacatggtttcgttgtaatataaggagctcatatcaagagtaccgtaaatagtgtacggtgtttcattacggattagtacatgcgtgtttttcataaattctgatacggcggttcggttgcggcttgattcacaaaaagggttttgccggtaacgtagagtggtatacacccacgtcgctaggtcccttaattgcgtggtcataatggacttcataaagctactatcaggacgataagcaattgtagacgtggaaacccgccttgcggtggtagtaacactataagttgcgttagtagtgacgttcagagcggttgacgttgtatagggagaatatggcgtagtagtactttgagatttcttactctttttttctgattgttctttgactggagcttgtttacgcttgagttttcgcatagtgtttttcaacttagtaccgttaatatacttagggacgcgaaataaatttcggctcatggcgttaaccaggtagaaactgtgcgtacagttgcgttgcgcgtaacgtagaagcaaggcggttaggcctaaaaagtagatcgtttgactatccacgtttactttcttggaacctacatataacttcgtgttccaacgtggcacattgaaaaacatggggttgaacgtggtgaaattgccgcagccttgttcgccagtatcattacgtttggaaacgtttagcatttcggaaagacaagtcatggaaggcaccgtaccgcaagatgggggtctgaatgttattgttttagccgtatgattgtattctgagaaaacgtacttagccggttttcgaagctgagtgctataaaaatcgaaccaaagataggtaacactgttattttgaatgggtcccgctaaaatgtaataccgtggaaactcggtcatgttcatagtcagatttttaatgtgttgtctggtcatattaaagtattttgtatagatatccttttctagttgtttcaaaatctctaatttgaacttgtctagtctttgcttgcctatcgtagacagtactttacctgaccagtaacgtcctacggataatcgtaccgcagccctacagtttatgaaagagaatagcaggaaagttagcgacataaggaagaataaattaaaaacacctctcatctctccttttctccccatgacagaggaggagaccccgcaccgtccgtctgccttgtggtttggcttgcctgcgtgtactcactgctgattctggtcgttttgctgctcatctaccgctgttgcatcggcttccaagacgacctagtttcccgcaccttggctgtgtaccgagcttgtatccagggaccgatatgtaaccagacccacaacagtacctcgtaaataaagacgcacacacctcacgcatatagtaccatcacaccgtgtggcgtgtactttattacaacgagcaagagtgccccctaactattggggcccgtaccgttttagaaggttttgtgtgaatgtctttaacttctctgtcccttttctcataaactgtcaggtcctacagtcagcatgtcttgagcatgcggtagagcagatagatgccgatgatggccgatagcgcgtagacggacatcatgaggagacgactgtcggtggcgtccacgacaacgtcagttacttctaggaccgtaccgtttttcaaaagcatgaggtagtgagttcgcggagatgagaccaccacttcgttgtagggatccagggcgaaaaggacgtcgtccgagtcgtgcatgtacatgatgttgatgacgccttgcgtgtcgtcgtattctagcagggcgctttggcaaaaggcgcagttttctagggaaatgttgagcgccgctgtgatgctgtgtgtggtatgcatgttgcgcgtcagttcgcatttagtttgactgtccgtctgggtgatgatgaggctttggcctacgacggtggtggagacagggtaggagatacctttgatcaggtactggtttgttacgacataactgacgtgttcggagacggtcagcgcggagaaggattcgcctagtggcagacaaaacaggtcggggaaggtttccaacgtgcttggttgcatggtagataggatggagagggcggcgggaacggtagtggggacggtggcatcggggaagagacgtgtgaggcgttcgagcgagtgatcgcgtcgcccgctactggaacagggtgtgtacaggtcgctgaggtattcgtggtgcggatgagctagcaactgcgtaaagtgtgatagctcggccaatgaacagaggcccgtttctacgatgaagatttcgcgtctctccgtcgtatgtaccagcatggagtggacgaggctgcccatgaggtagagttcttgacgcgcgaaggctgaaagaaaagaggccaggtgcgttttgtgtagttttagggcaaagtcggcgatctgtcgtagtgcccactgggggatgagatgttgctgattctgtttagagagtatgtagaccaggcgtacgaggctggtgatgtcggtgatctgattcggtgtccaaagggctcgtttggccaggtccacggccgtgggatacagtagcaacgtggtgcgtggtggtgtttgtgagaggcaggtgatcataaattcttgtatttgtaagagtgcggcctggcggtctagggcccgtgggacggagacttgggcgccggcctcttcttgtcgggctgctgcgaacagtgctaatgcgtaggcgaaggccatttctaccgtgcggcggtccagcatctgacatcgaccgctcttgagtacatccacggcgtaacggtgaaagctgttacgtagtagtgcgctgaggtctaggtagttgaagtcaagtgcggcgtcaagaaagtccgggtctttgagataagagtgacggttcagttgatctttcttaactagcaccaggagctcgtgtttttcagtttgtcgtagtataaagttgtcgcgttgatagggcgctttgaaaagtacgcgtggaagatggccgaagataagcagcatgggtgtgtcgtcgtctatggacaccgtaactacgaagaagtcctcggtcagtgtgattttaacgtaacgtagttcgtcgatgaggtaaaagccttggtgcaaacaaggtgtgacggtgctgaatagtagatcgtgtccatcaaagaggatacaggtctggttaaagtgtggtcggtgtagtcctgaggtggtatgtgattctgtccagccgtgtggagtggtttgcggtggcatccaaacgtgaggtattgacaggtcaatgggcggtggcacagtggtgggctgttcacctaggctgtcttgtgcctttagctgctgcgaaaaagatcggtagctggccaggtctttggataccagcgcgtaagtgttaagtctctgttggtatctttccagggtttcggtcagatctacctggttcagaaactgctccgccagaggacccgcaaaaagacatcgaggcatatggaatacatagtattgattatagctttggaaaaagttgaaactgatggcgttttccctgacgaccgtgctgttacggaggctgctgttgtaggtgcactgggtggtgttttcacgcaggaagcggatgggtctcccgtaggtgttgagtagtaggtgaaacgcgtgagggtccagcgcttcggatgcggcgtctgcgccatatcgttgcgaaggtaggtgactgaggaggtagacggcgaagacggtgaggtaggaggggaggccgggccgcatagcgcggccgcgccgctgggttcagcggcgtgatccaggtggtggttggcgttacacccgagagaaggagaaaaaggatcccaggaaggagcacccgggtgcggcgctacgggttacaaaagtcgcgtctccgtctatttaatacgatgtcattggccgctgcgaagggagaagaggggacacgcgaataagccatgccgtccgggcgtggggacgacgctgatttgacggggaacgctctgcggagattgcctcacgtgcgtaagcgaatcggtaagcgcaagcacctggacatctaccgtcgtctgctgcgggtctttccctcgtttgtggcgctcaaccgcctgttgggaggccttttcccacccgagttgcaaaagtaccgtcgccgtcttttcatcgaagtacgattaagtcggcggattcccgactgcgtgttggtgtttttaccgccggactctgggtcgcgcggcatcgtgtattgctacgtgattgagttcaaaaccacgtactcagacgccgacgatcagtccgtgcggtggcacgccacccacagcctgcagtacgccgagggcctgcgccagctcaagggcgcactggtggactttgattttctgcgtctgccacgcggtggcggtcaagtctggagcgtggtgcccagtctggttttttttcagcaaaaggccgatcgcccatccttttatcgggctttccgctcaggccgttttaacctgtgtaccgattctgtcctggactatctagggaggcgtcaggatgagtctgttgcacaccttttggcggctacccgtcgccgtcttcttcgagccgcacgaggaaaacgtgctgcgctgccccgagcgcgtgcttcggcggttgctggaggacgcggcggtggcaacgcgcggcgggggctggcgcgaggacgtgctcatggaccgggtgcgcaaacggtatctgcgtcaggagctcagggatctgggtcacagggtgcagacttactgcgaggatctcgaagggcgcgtgtccgaggcggaggcgttgttgaaccagcagtgcgagctcgacgaaggaccgtcgccgcggacgctgctacaaccaccgtgtcgtccgcgttcgtcgtccccagggaccggcgtggcaggagcttccgccgtcccacacggtctttatagtcggcacgatgccatcacgggacccgccgccgccccgtctgacgcggcgaccgcgtcagcggccgccggtgcttcttctacctggctggcgcagtgcgccgagcggccgttgcccgggaacgtacctagctactttggaatcacgcagaacgatccctttatccgctttcacaccgattttcgtggcgaggtggttaacaccatgttcgaaaacgcctccacttggactttctcctttggtatctggtactatcggctcaagcgggggttgtacacgcaaccacggtggaaacgagtgtaccatctggcgcagatggacaacttttccatttcgcaggagctgctgcttggcgtggtcaacgctttggaaaacgtgacggtgtatccgacgtacgactgcgtactctccgatttggaagccgccgcctgtctgctggccgcctacggacacgcgctttgggagggccgcgatccgccggactccgtgacggcggtgttgagtgagctacctcagctgttgccgcgtctggccgacgacgtgagtcgtgagattgccgcttgggaaggccccgtcgccgtgggtaacaactattacgcgtatcgcgactcgcccgatctacgctactacatgcccctaagcggtggtcgccactatcacccgggcacttttgatcgtcacgtgctggtgcggcttttccacaaacgcggcgtcctccagcatttgccgggctacgggacgataacggaggagctggtgcaagagcgtctgtcgggccaggtgcgcgacgacgtgctttctctctggagtcgacgtctgctggtcggcaagctgggtcgcgacgtgcccgtctttgtgcacgaacagcaatatctgcgttcgggcctgacctgcctggctggcctgctgttgttgtggaaggtgaccaacgcggatagcgtcttcgctccgcgcacgggcaaatttacgttggccgacctgctgggttcggatgccgtagccagcggcgggttgcccggggggcgcgcgggcggcgaagaggagggctacgggggacggcacgggcgggtacgtaactttgagtttctggtgcagtactacatcgggccgtggtacgcgcgcgaccccgcggtcacgctgtcgcagctctttcccggcctggctctgttggccgtgaccgaaagcgtgcgcagcggctgggatccctcacgtcgcgaggacagcgccggaggtggcgacggcggcggcgccgtgctcatgcagctcagcaagagcaaccccgtggccgactacatgttcgcgcagagctccaaacagtacggcgatttacgtcgcttggaggtacacgacgctctgctctttcactacgaacacgggctagggcggctgttgtcagtgaccctgccgcgtcatcgtgtgtccactctgggctcgtccctctttaacgtcaacgatatttacgaactgttgtactttttagtgttgggttttcttccgagcgtggcggtgttgtaatttccaccacgtgtcgctcgctgcataaagggcgagcgtccccggagagggtatattcgtttggcgagagcgggcagcggtggtgggtaccatggcgttcagcagacccggcctgcccgtggagtacctgcaggtgcccagccccagcatgggccgggacatcaaagtgcagttccagagcggcggagccaacagccctgccctgtacctgctggacggcctgcgggcccaggacgacttcagcggctgggacatcaacacccccgccttcgagtggtacgaccagagcggcctgagcgtggtgatgcccgtgggcggccagagcagcttctacagcgactggtatcagcccgcctgcggcaaggccggctgccagacctacaagtgggagaccttcctgaccagcgagctgcccggctggctgcaggccaaccggcacgtgaagcccaccggcagcgccgtggtgggcctgagcatggccgccagcagcgccctgaccctggccatctaccacccccagcagttcgtgtacgccggagccatgagcggcctgctggaccccagccaggccatgggccccaccctgatcggcctggccatgggcgacgccggaggctacaaggccagcgacatgtggggccccaaggaggaccccgcctggcagcggaacgaccccctgctgaacgtgggcaagctgatcgccaacaacacccgcgtgtgggtgtactgcggcaacggcaagcccagcgacctgggcggcaacaacctgcccgccaagttcctggagggcttcgtgcggaccagcaacatcaagttccaggacgcctacaacgccggaggcggccacaacggcgtgttcgacttccccgacagcggcacccacagctgggagtactggggagcccagctgaacgccatgaagcccgacctgcagcgggccctgggcgccacccccaacaccggccctgccccccagggcgctaccgagcagcagtggaacttcgccggcatcgaagctgccgcgagcgccatccaaggcaacgtgaccagcatccacagcctgctggacgagggcaagcagagcctgaccaagctggctgctgcttggggcggatccggaagcgaagcctaccagggcgtgcagcagaagtgggacgccacagccaccgagctgaacaacgccctgcagaacctcgccagaaccatcagcgaggccggacaggctatggccagcacagagggcaatgtgaccggcatgttcgccagggccacagtgggcctggtggaggccattggcatcagggagctgaggcagcacgccagcaggtacctggccagagtggaggctggagaggagctgggcgtgaccaacaagggcaggctggtggccagactgatccccgtgcaggctgccgagaggagcagagaggccctgatcgagagcggcgtgctgatccctgccagaaggcctcagaacctgctggacgtgaccgctgagcctgccagaggcaggaagaggaccctgagcgacgtgctgaacgagatgagggacgagcagacaacagccagggacatcatgaacgccggcgtgacctgcgtgggagagcatgaaaccctcaccgccgccgcccaatacatgagggagcacgacatcggcgccctgcccatctgtggagacgacgacaggctgcacggcatgctgaccgacagggacatcgtgatcaagggcctggctgccggcctcgatcctaacaccgctacagccggcgagctggccagagacagcatctactacgtggacgccaacgccagcatccaggagatgctcaacgtgatggaggagcaccaggtgagaagggtgcctgtgatcagcgagcacaggctggtgggcatcgtgaccgaggccgatatcgctaggcacctgcccgagcacgccatcgtgcagttcgtgaaggccatctgcagccccatggctctggccagcaccgccgcttccgataacttccagctgagccagggcggccagggattcgccatccccatcggccaggctatggccatcgccggccagatcagaagcggcggaggaagccccacagtgcacatcggccctaccgccttcctgggcttgggcgtggtggacaacaacggcaacggcgccagagttcagagggtggtgggcagcgcgcccgccgctagcctcgggatcagcaccggcgacgtgatcaccgctgtcgacggcgccccgatcaacagcgccacagccatggccgacgccctcaacggccaccaccctggcgatgtgattagcgtgacatggcagacaaagagcggcgggaccagaacaggcaatgtgacactggccgagggccctcctgctgaattcatggtcgacttcggcgccctgcctccagagatcaacagcgcaagaatgtacgccgggcctggatcagctagcctggtggccgccgctcagatgtgggacagcgtggcctctgacctgttcagcgccgcctccgcttttcagagcgtggtgtggggcctgacagttggatcttggatcggctcttcagccggcctgatggtggccgccgcctccccctacgtggcctggatgtctgtgaccgccggccaggcagaactgaccgctgcacaggtgcgggtggccgctgccgcctacgagacagcttacggcctgaccgtgcccccccctgtgatcgccgagaaccgggccgagctgatgatcctgatcgccacaaacctgctgggccagaacacccctgccatcgccgttaacgaggccgagtacggagaaatgtgggcccaagatgccgccgctatgttcggctacgccgccgccaccgccaccgctaccgccacactgctgccgttcgaggaagcccctgagatgacctccgctggcggcctgctggaacaggccgctgctgtcgaggaagccagcgataccgctgccgctaaccagcttatgaacaacgtgccacaagctctccagcagctggctcaacctacccagggcacaaccccttctagcaagctgggcggcctgtggaagaccgtgtccccacatcggagccccatcagcaatatggtcagcatggccaacaatcacatgagcatgacaaacagcggagtgtccatgaccaacacgctaagcagcatgctgaaaggcttcgcccctgctgccgctgcccaggccgtccaaacagccgcccaaaatggggtgcgggccatgagcagcctgggctctagcctgggctccagtggactgggcggcggcgttgccgccaatctgggcagagccgccagcgtgggctctctgagcgtgcctcaggcttgggccgccgctaatcaggctgtgacccctgcagccagagccctgccactgacaagcctgacaagcgccgccgagagaggccctgggcagatgctgggaggtctgcctgtgggccagatgggcgcccgggccggaggcgggctgagcggcgtgctgagagtgccccccagaccttatgtcatgcctcacagccccgccgccggagatatcgcccctcccgccctgtctcaggaccggttcgctgatttccccgccctgcctctggaccccagcgccatggtggcccaggtgggccctcaggtggttaatatcaacaccaagctgggctacaacaacgccgtgggcgccggaaccggcatcgtgatcgaccccaacggcgtggtgctgaccaacaaccacgtgatcgccggcgccacagacatcaatgcctttagcgtgggatctggccagacctacggcgtggacgtggtgggttacgacagaacccaggacgtggccgtgctgcagctgcgaggcgcgggcggactgcctagtgcagcgattggcggaggtgtggctgtgggcgagcctgtggtggctatgggcaacagcggcggccagggtggcacccctagagcagttcctggcagagtggtggccctgggacaaacagtgcaggctagcgactctctgaccggcgccgaagaaaccctgaacggcctgatccaatttgatgccgccatccagcctggcgatgccggcggccctgtggtcaacggcctgggccaggtcgtgggaatgaacaccgccgctagcacccccggactcctcaccacagctggagctggcaggcccagagacagatgcgccaggatcgtgtgcaccgtgttcatcgagaccgccgtggtggctaccatgttcgtggccctgctgggcctgagcaccatcagcagcaaggccgacgacatcgactgggacgccatcgcccagtgtgaatccggcggaaactgggccgccaataccggcaatggcctgtacggcggcctgcagatcagccaggctacctgggactccaacggaggagtgggaagccctgccgctgcttcccctcagcagcagatcgaggtggccgacaacatcatgaagacccaaggccctggcgcctggcctaagtgttccagctgtagccagggcgatgctcctctgggcagcctgacccacatcctgacctttctcgccgccgagacaggcggatgtagcggaagcagggacgactaggcggcggcgctgtacgccagcggggagaaaagtggcagataaatcacgtcaggttcacacgtcgttagccagcgtcggcatatgaagggcgcgggcggccagtacggcctctgggctgagacaggacgaggcagggtgagaaagaggaggatgggggggaccggggtggtggtgctgctgctgttgtgggtgtggacggtgcggatgccgggacagcgtgccggcgaacgttctgtaatcttccataataaaggtaaaaatgcccgtctcgtgtcgactccgctggatctcgaaggcgtcgggggtaatgcgcatcttgccggtgccgatgagataaaagtaccacattttttgacagatgatgcgaatcaagggttcgtacgcttcggcaccccagtggcgcgtgaagaaggccgccagacgaaacaagcggtgtccgtagagcgtgcctagggagaagaggatgttgccgttgcgcgccaggtcttcggggaaaacgaccggcaggccggtgtggcgctgcacaaagcgcgtcagcagtccgccgctcaagcgcgggtgacacaggcgctggctgagacgggcggcgcgcgtttcatcgaacacggccgcctcaaagtccagccccgggaaggcctgacgcagttcgcggtacagatgaggccagtagggttgcggcgtcttgcgactaagcacggcgtggtccgagacgcccaggttgttcatggtttcgcgcagtagcagcgtttcgagaccgcggtgaaagaggaggacgcagatgaggcgtacgattttgagttcttccaaacgcagcgagctcagcggctgtccgcgcgacatcttctcgctaatctgtaatattagatgattggcgcaagtaaaggagaatttgcccgtgcggacccgcgggacggcggggttctcttcgtcgcgggccatcatcgttcgctcggtgagcgggtagcgacggtgacgacaatgacgatggacgagcagcagtcgcaggctgtggcgccggtctacgtgggcggctttctcgcccgctacgaccagtctccggacgaggccgaattgctgttgccgcgggacgtagtggagcactggttgcacgcgcagggccagggacagccttcgttgtcggtcgcgctcccgctcaatatcaaccacgacgacacggccgttgtaggacacgttgcggcgatgcagagcgtccgcgacggtcttttttgcctgggctgcgtcacttcgcccaggtttctggagattgtacgccgcgcttcggaaaagtccgagctggtttcgcgcgggcccgtcagtccgctgcagccggacaaggtggtggagtttctcagcggcagttacgccggcctctcgctctccagccggcgctgcgacgacgtggaggccgcgacgtcgctttcgggctcggaaaccacgccgttcaaacacgtggctttgtgcagcgtgggtcggcgtcgcggtacgttggccgtgtacgggcgcgatcccgagtgggtcactcagcggtttccagacctcacggcggccgaccgcgacgggctacgtgcacagtggcagcgctgcggcagcactgctgtcgacgcgtcgggcgatccctttcgctcagacagctacggcctgttgggcaacagcgtggacgcgctctacatccgtgagcgactgcccaagctgcgctacgacaagcaactagtcggcgtgacggagcgcgagtcgtacgtcaaggcgagcgtttcgcctgaggcggcgtgcgatattaaagcggcgcccgccgagcgttcgggcgacagccgcagtcgggccgccacgccggcggctggggcgcgcgttccctcttcatccccgtcacctccagtcgaaccgccatctcctgttcagtcgcctgcgcttccagtgtcgccgtccgttctccccgcggaatcaccgccgtcgctttctccctcggagtcggcagaggcggcgtccatgtcgcaccctctgagtgctgcggttaccgccgctacggctcctccaggtgctaccgtggcaggtgcgtcgccggctgtgccgtctctagcgtggcctcacgacggagtttatttacccaaagacgcttttttctcgctacttggggccagtcgctcggcagcgcccgtcatgtatcccggcgccgtagcggcccctccttctgcttcgccagcaccgctgcctttgccgtcttatcccgcgtcctacggcgcccccgtcgtgggttacgaccagttggcggcacgtcactttgcggactacgtggatccccattatcccgggtggggtcggcgttacgagcccacgccgcctttgcattcgtcttatcccgtgccgccgccaccatcaccggcctattaccgtcggcgcgactctccgggcggtatggatgaaccaccgtccggatgggagcgttacgacggtggtcaccgtggtcagtcgcagaagcagcaccgtcacgggggcagcggcggacacaacaaacgccgtaaggaagccgcggcggcgtcgtcgtcgtcctcggacgaagacttgagtttccccggcgaggccgagcacggccgggcgcgaaagcgtctaaaaagtcacgtcaatagcgacggtggaagtggcgggcacgcgggttccaatcagcagcagcaacaacgttacgatgaactgcgggatgccattcacgagctgaaacgcgatctgtttgccgcgcggcagagttctacgttactttcggcggctctccccgctgcggcctcttcctccccaactactactaccgtgtgtactcccaccggcgagctgacgagcggcggaggagaaacaccgacggcacttctatccggaggtgccaaggtagctgagcgcgctcaggccggcgtggtgaacgccagttgccgcctcgctaccgcgtcgggttctgaggcggcaacggccgggccctcgatggcaggttcttcttcctgcccggctagtgtcgtgttagccgccgctgctgctcaagccgccgcagcttcccagagcccgcccaaagacatggtagatctgaatcggcggatttttgtggctgcgctcaataagctcgagtaagagagacgctatatttagggtttccctctcttttttttttctacaccgtgataccctaataaagcacactgcggttattatcaacgtctctgtgtttttattatttagaaataaatacagggaatgggaaaaacacgcgggggaaaaacaaagaagtctctctctagatgcggggtcgactgcgtggggtgctggaagtggaagcggtgctgatgggtgagggtcgtggcgcgggcacggaccgcaacgtgctgctgatgtctgccgcggtacgcacgtcgccgtccatgtcgctgcgcagataagaggtaggtcgtaatgcggcgtgctgcacgctcaccgttaatggtaccaagtcgtcaaggctcgcaaagacgtgccacgaggggatgacgagcgtgagagccccgttgttaccgcttcgacgtctttgtccggtcaggatcagtgcccgggacagtccggcttgggtgtccgagtcctcgtcgccgctggcctcctcgaagccggcaaacatggcttcggacaggggggtcggcgtcggtgtggaggagaggtcatcttcgtcgtcctcttcctcttcttcctcctcttcctcggtgggtggtaatccgggggactgcgggagaaactcggagacggcgccgcgcacgacgtcgctccgtggaaagagaccggcgcgcagctgcacctggggacgcttgattttgtccggtttaccgggtgtgagagtccaaaacccacggcggaaaaagtggatgcggcctagcggctgtcggtgttccaaatgaacggcctggtcgccggtcagcgtgacgcggagggtgattcgcacacgatcgggtagcgggccggcttctatggagacgcccgggatgttttccgggaaaaagatggtgtcgtgagtctgattggtttcgaaagcattctggatctgcacgatgtactcgggatgtatgcgcgtcagcgtaaaacttttgggaatcaacagctggaagccgttgtccggcaagcgtcgtaggtgcgggtacggattgtgtcgcgccaccacctcggcgcgatgcgtgtaaaccgaaaagtgcagaaacacgctggtcggcgggtgcggtgagtcgtgatgcagaaacagcatgatccattggcctcgttcgtccgtctccgttttgtggatgtacgtgttagggtccgaacaggccagctgctccagggcgtctaccagcgtcagcgggatggcgccggcgcgaaaggcgaactggctgacaaagatctgccctgcctccaaactgctgtcggttctgcggcgccagttcggcgtcacggtcagtcgcacggcccagtggtgagccgtgcggcggatgatggcgcgcgcctccattcgcggccgattttcttcgccgccgcgccgctggctctgaaagaggtgcagtccgctaacgggcacgcggtctagcggcagcgcaaaggccagcaccgagaccgtgttgttttctgagcctggcgtcaggcgtcgtgggccaaagttgttgaggtccaccagcagtcggtcccgttcgcccaccacgcagcggcccttgatgtttaggtcggtcaggtctacggtgtcgtgcggagatttgttctcctgaaaacagcagagaaccgagggtcggctcacctctatgttggtacgcaggtccaggagtcgcagacgaccggcttccagcgagccgccttccacgttggtgatgagccgaagcacctggcagtgcaggcgaccaaagctgccgctggcggcttcggcctcgctgatcgcggccgcttccgacgagggtccctcaccgggcgaggacgatgcctgagacattgcgaaggcgggatggggggagggtcaggggatgcgcaaaggtgaacgggtcttcgtgggaggtcgggaagggttccggcaactgtcgcaaatatagcagcggcgacaggtgtggcgcccaaaagtcgcgtgtctgagtggacgtgggtttttatagagtcgtcttaagcgcgtgcgcggcgggtggctcaacctcgatgctttttgggcgtcgaggcgatgcatggcccgggcagggcttcttgccggtggcggcgacgtttgggttgcgcagcgggctgccatacgccttccaattcggcgaagatgcggtagatgtcgttggcgtcccagaagaactcctggtacttcagattctgaccctgaaccgtagccaccatgggcaccaggttgcgggccaggatgccggcctgccagggcggccaggtgaacacggccggattgtggatttcgttgtcggaatcctcgtcggtgtcctcttcgggcgcgacggtggactcggccttaaggcggccgcgtgtcataacgcccgccgtgcacgccgtcgccgaggatgctgatttgcgtttgcggcccgcggaagtggaggcgcccgccatggcgccgccgccggtaacgcggggcgtcttgcgctcggtggttacgagttcttcgtcggagtccgatccgctggtccagacgtcgtcgtcgccctgggcggcaccctcgtcgtgccggtcccaggtgtgtcggtactcaagcttgccctggatgcgatactggctggtgaaggtggggtgctcgctgtactgaggcccgcgctgcagcagcaagtcgatatcgaaaaagaagagcgcagccacgggatcgtactgacgcagttccacggtctcgcgtatcgcttgtacctccaggaagatctgctgcccgttcatcaacaggttacctgagatgctcaggcccgggatgctcttgggacacagcagcccaaaatgctcgtgtgaggtaaaagccacatccagcatgatgtgcgagatcttgcccggtttgattatcatatttttgggacacaacaccgtaaagccgttgcgctcgtgggggcgcatgaagggttgcgggttgcgggtcatcgtcaggtcctcttccacgtcagagcccagcgtgacgtgcataaagagcttgccggagggcacgtcctcgcagaaggactccaggtacaccttgacgtactggtcacctatcacctgcatcttggttgcgcgcgtgttctccatggagcaaaccagctcgtgcgcgcacaccacgtgccgcagtgccacgtccttggtgggaaacacgaacgctgacgtgtagtagacgtcgggctctttccactggttctgctgacgcgtccaggccagtcccgagaccgtgagacgcgcctgccacatctgcttgcccgacgcgtgaatcacagcgtcagctacgggcaggtgtcggtgtttgcgctcggccgccgacgggtagtggtgcacgttgatgctggggatgttcagcatcttgagcggcagcgcgtacacatagatcgacatgggctcctggctggggcagatgcttcggcccgtggggttgtgcacgttgaccgacacgttctccacctcgctgcccgtaaagtacgtgtgctgcacctgcagctgattgtcgccgcggtggcatggcgtcgagtcgggcgtgtactgcgacaccaggatcagcgagggctggctcacgcgtacgtggatacccgtctgcaggagtcgcgtctcgtgcggcagcaccggcgtgtcgccgcgactaaacacggctttcagcacgtgccccgaaatgggacccagtacggatatcatttcgggacaacggcgaccgcgcgactccatgctgcctgcgcgtacgggtgtaggcgactgagcggcgcgccctttgcggccgccgccttacataggcaggcgaccaaacgcggaacccgaaataaaaacgttctacacagagacaaccgcggattattgagtgtctttttttattacaaaaaaaaagaggcaaagccccaccgtcaccacaccccatcacacaccaccaccgattttttttgttttaaccccgtatcgcgcggacgcctagtgtccgtttcccatcaccagggtcctctgtttagagatcgccgcagaccatggctaaagtgacaggactcgttttctctgtcgtattttccgtgagcttacagtcttgcggttccgtctccggggacgccagtcgcatgggcagcaggtcctccagcgcgatggaagcgcccagcaccgagagctgctgttgcgacggcgaatgggacgtggaccgcgagtgtagcgtggatttgacttggtgcgtcattgctgacaggcaaccgcgattcagcgtatgctttgacgagataaaatagaggcgtcccaggagcgcgtcccgtgggaacgtggcgccgttctcgtcgctcaccagtacggttaattccaaccaggagcgcggtagccagaccgtaacgggcattttgagtccctgacggttgtgtggtacaaaaacacccagataaggcccgtaaaagcggcggtagatacgtaacgtgtgcgagtttttcagcgtcaattcgtaagggacgcgcacctccagtccctcgtccgccgcaccggagcgtggcggtacaaagtaaggcagtggcgcgtccgaaaagaagggtcgtcgcaccgtttcgcgtcgcagccgcaggcgaaacgccactgggtcggctggcgcctcggtgcggtcgcaggtcacgttgaaacgtaacatgccgtcttggtatagcgtgagtgacgacagcgtcaggtccggcggtgattcgttcgggtctagctccaatcgtccaaagacggagggtcccaatgtcttggcagtggtttccgagaggcgcgccgagatacggctggtgagtccacgcggccccgagatgccgccttccactcgatgccagcacagcgcgtgtcgtacgcgcaccgtcagcgtgggcgtcagatccgcgtccgttgattccgcggtatcagcgacggaagccgcgttctccgttacgttgtttatatccagcgtcggctcgaacgtgagttctggcagatgcagcgcaagacagtcgtgtaacgccgtgtgatgcgcggctttacgtcgtagcggtagccgtttcagcagcggcgtgatgatacggagcgcgaagagattgagtgataagcgcacgatggccatgcgcgtcagttgctggtcgattactgagcgcaggatatggcagcctgggcgtgcgggaaagagagagaaggccgggcgtacgtcagaatcctcgttagataccacgcatagaatgccgcgttcacgatcgtcgttgcggtcatcctcgtcctcttcttttttcttctctttttccttttttttctcgggctcatgggaagccgccgtttcttcttcttgcgacgtcgcggagtcggtttgagactcgccgttcgcttcccccaattgcagcggcgtagagagcagaatctggaagggatcccgcaattcttcgggtcggaggtcgaggtgcaactggatcagatggtaggtgccgcggtgcacccgaggctgacggatgtcgtgtttatccgtcagtgtgaggatggtctgcggcgagccgctgtgcttgtccagctcgtccggcgttttcaggaggaggctgtcgtcgtcggtactggcgacgcccatcatggtcgtggtggtagtggtggcgaggaaagtgagcggcggcgctgacagagctcggcgttggcggcggcatttgccgctgtgtcggctgctattgctgccaacgccaccgccgccgcctcgtctggctcgtggccggcgggcccgattccgaaggttggggtcgacgcgtggcatgcttggtgtctgcgggcgcgagagggctggctcagcctttaaatatgcaggtcgcggatttgttatcgggtgaaacgtcacacaccgtgaagacgacctgttcgcggatgaggtcatccagctgtcgcagcatgacgaaaagcgccgacagccgcgcgatctcgtcgtcgggcgacacgtgctgcggccgcgcgggcgtgcgcggctcgccgacgctgcgctcgcggtccagccgcatcagcagctcctggcacttgacgagcagcatggagctgtcctctagcgccaacttgcgcacgtaggtcatggtcagctccgaggctaggttggccaccatggacatggagaggcaggcggtcttcatgtcgatcagcaggtgctggtcgatgaccggatcggggatggtgaaggtggcgtcgcgaaaagtaatggtctgcagctgctgcacggcagcctttacctcctcgtacgaacggtcgagcgagaagaggcccatgatgagtagtcgctggttgatttccagcgccagtggcatgggtacgatccagggcagcaccagctcccactggcccagcgtcagcaggttctcgcgcgccagcggtccgtggaagagcggcggcagcacgcatagcgcgtcgcccttctcccaagtcacgggtcccgtgttgaggacggtgtagagcagtccgtgcgtcggtacgtgtaggaggatctggttgccttctacgcgccgcatcaacgtcagcgtcatattgcgcagcaggccgcgcagtcgtacgtagccgcgggtgtgatctacgaactggtgtaggcccagctggtagtgtttgatgagatgtagacgctgcggaatgggcacaacggccgctactagcttggtcagtttgcctacgtcggcgatgctgagcttgtggtcgaaagtgcagaagatgttggcctccatggccgccatagcggcggtgaaatcctggccgcgacggaggagaagcagagacgaacaacgtctgcaccgggcgcggcgtcagagcgagcgtggcgcgtccgggcccgcgtttgcgtctaggtgattcgccgttaacctgcggtcgtcgccgtcctcctcaccggacggcctcacgagttaaataacatggattgctgtagcgggatgatttcgcctacgacgtagttaccaaagtgcgtttcggacgtggcaaaagccccggcgccacccttgagtttggtctccatcagcgccagcgtggtggtgctgaggatcggtagcgcttcctgcgtcagacggcacgggttttcgatgagttgttccgtgccttcgacgcagacgtactgcgtgtccgtgtcgccgcggatgcagtccttggcgcgtagcaggtactcgtcgatggttttgaagagcgttttgttggccgcgataatctcttccgtgttaaagtactgcgcgcaggggctgtagaatttggagttgtagcctagacgttcgcgatgtcgggtgttgtagagtacgtcgctcagacagccggcttgcgaggcccaggggttgtgtgtggccgcgaaagtctgtgcgtccgcttcgcgatggtcgtagatggccttggtggcggcctccgtgtcgtacggatcgacggccagcatgcaggaggcacgcccgcgcgggttgttggggatcttaaagtaattaacgtccatcgtcaccggcgtaaggattagttcgcacgcggccttttgtccgtgcaccgtggcggcggcattgcgctcggacatgctgccgaacgtcagcatggagatggtctccgtgtctaacagttgcggccgttctacgccggccgcgtgccggatccagcggtccacctcgtcgtgccggtacacgttcatagggaagacgcgaaagaggtcctgcacgcggacgcccatgtcggttcgcacgcggtttacgtaggctacgcaggtatttgacgtgtaacccagacccatgtctacggtgttaatgttctgcgtgacgtggtacgtggtgctgatgtcgcgttcctccttggtcacgatagggttgttgatgataactgacgtgcacgatttgccgctgtagagcagcatgtccacctcgaaggtgtcggtgcgtacggccgtgagtgcgaatcccgggtggatgtgcgccttggtctgcagcaccagtgaaactggtgagattttgtataacatggcggccagcgtcatgactgagtgcaacacgttgggacaggtggccgagtaacgcgaaaagggcgagcgcagccagttgtggtactcgtgtgcgaaggctgtgggtagcgggaaaccaccgtcgtgacggtgatagtgcgggaactcggtcacgtagcgtttaatgtcgtcgctcaacgccgcgcagatggtggggtttgagtagaaacggtggaaaggtacgggtaggctgtactcgatcaacgtcttaggcgccgtcacgacgcagcagccgttgtaaagcacgtgctgacgtgagataaagtccggcaggccctgacgttgcgcgtggtccagaggcgcgcgcacttcgagcaccttgacgtgctcgcccacgaattgcacggccaaaaacagttcacgacaggcctgcagcagcggcgtgtgcgcgtcggtggcgacgtcctccaccagctcggtcagcatctcgcctacggcttgacgttgcgccgctatcgagtcttcgggggtgacgccgcttgtgctctctttcgacgtcgtacctgacgtggagaccgcggtggcggccggcatcaggagaaacgccggtcggtaaaagaggtctactagcagcgtcttgaggttgagtcccaggccgcaggcccggttgttggtcatggcgggcatgaggcagagataaaagaccttttgtaacgtccattcgtcgtcggtggcacggtaatcgtccacaaacagcggctcgtcggcatccatggcgcccaaacgcggtacgtcagaaacgccgtggtgtcgcgcctcgatgttggccgggttcaacggttgccggtcggccactacctgtacgccttccatgttacgcggcaggtgcgtaacgaaggggggccacagccggtggtcgtgcagcgcgttcacgtaagccgatagcggttcctcagccagttgaccgttgttaagtcccggcagcgctgagatgcgcgttaccagacgcagcacggcgaccagattgcggtagtgaaagagcaactgcggtggtagggcgccatcagccaggtgttcggcgatcaacgtcaccagcgcgtagctgtgcgcaaaaaccagcagctgacgtgtgtgaaacatgttgacgatacaacgtgctacgaaagtgcggattagcaaaaaagcgtcgacgttgccgtgtaccagcacgtcgaccaggtagcagagctcggggtaattggggcttgtcacggtggttttgaaaagtcgcaacgtctcttcgtagtcgggtggtggccgcagtcgcatgtgttccatgatctcccaggtgcgcagttcgtggaaggggcccggtgccagtccatctggcaaattaccgatgacgatacgcggtgtacacagcgccaccgtttcgctgttttcctggcagtgcgtaaagtcgaagaaggggtgcagctcggtgtagagcgtgatgttgcccaccttgtagaagtcggtgaccacaaagtcctgcttcatttcgttcaccgtgcgcgggacctcgcgtcgtacgcggtaaaaatgcggtatgcggcgcgccgcaccgcccatgggttcctgctgaaaacgacactcgagcagtcgttgcatggcgggttccgagggcggtccgcgttccgtgaaggtctgtagacagggcgcgggctcgtgcagcaccgggtggcacagcgtcttgagcgcgtccacaaagtctatcttttgtacggcacggtcccggtttagcaggtaggccgtggtgggcaacgcgttgcgaacggtgtcgttaagcttaactttgctttccaccgtggtgtaaccgcgatcctcgggcagatacagccctacggggaagaaaaacgtcaggtccacgttacgttctagcggatctttggtatcggtgtttttgtagacgcgccgcaagttttccataatcaccgttttttcgcccagtcggatcacgtccatgctcagcggcgttaagctgtgcgccccggcctgcgaaagcgagtcgttgggcaaatgcggttggcccgaagtcagatgagccttgtacgagttgaaatcggccaggatcgagtgataggatatggcagtgacggcattttcgggactgagtacaaaattgccgtaggtggccggcgccgagaccgtttctttggtgatgtggcttgagagcagcgacatgatgatctgcataacgttggccgtgcttaccatcacgccgctgatcttggcccccgagctcgtggtgtacgtcgtggggttgtctaggatgctatcggtggccgcttcggctagacgcgtgaggaacttgagcacatagtcgcgatcgcgcgtgcgattcagcaaaaagagcgtggccagcattttggccttgaagctctgcaagatgttgcttcgctggatgcggttcagcgcctgtcgcgccagcgtggcgttctctaccagcgtctgcactacaaagtacggcggcgccttgcgtagcagtgtctgtaaaaagctgtgaatcaagccgcgttccatggcgtcggccgtgtttttgagcgcgcgcagcaccgtgtgcatagcttccacgttgaggatcttgtccaggatggtgccttcgaacgtctcgcgcagatacgtgaggcaggctgcgctgagctcaaaggggatggtgatgggggatttttcactgtatttggtgaccataatggtggtctgacgactggtgggcaaaccggcgccgctggccacacgcggcacctgcacgtggaacagcatttttcccgtagtcagtttattgaggtcgtggaacttgatggcgtgcgccgccgcggccaagccgctggtcaaaaaataaacccattccaggcgattgcagaaggtgccgaagatggcttcgaagtgaatattgtaacgctcggggtcgtcgccgtagtagatgcgtaaggcctcgaacatctcctcgccggcgctggtcttgacgtgcgtcagaaagtcagtgggaatgcctactttaggcaggagctcgagcgccgaccagttctccatcgcggcggcggcgtgagcgcgaggcgtcggagctcggggaaagcagcgcgacccggagaatggccggcgctgcgccgcgccgcctcggctgtgacgctctaatagtcgtcggcggctccgctacgccgcgccgggttttacacgtccccgtgcacgttcgcgcctgcaacctcacccaagagctatcgacgggcgaggacgcccgcttctgtcgtccgcgacccgttaacgtcgaacgggtgcgcgctgtttttgcggctctctaccgtgcctgtccgatacacgtgaggaccgagcccgagcgtgtcaagctggtactgggtcgtctgttactgggacccgtggccgtaccctgtttttgcgacggtgaagtggagggccacggtgaacatctggtacctacgacgcagttttgtcgcgggccgctgctctacgtgcaccgacgttgttgttgcggatccgtgaccgccgggcgcgcgctgtcctaccacgttctcgaaaaccacgtggccacgcatgtgctacgcggattgctctcgctgacggaatggaatcgagaattgccgagcctcttttgcgactgtcctggcggcggtggcgcctcgggaaccgaggaacgctacgccatggcctgcctgccgcgcgacctcagcctgcacctggacgactatccttacctgatggtggaaatcggacgcgtactcagtgtcagcgaggtagacgactacgtaaccgccgtctccggctacctgggcgaggccgcggcgccgcgcattcaggttcactacaagctgctctttggactcaacgtgcgtccgcaagcgccgtgcgcgttggacgctacacgcgacttttttctgctggagctgcaaaagctttggctgggcgttgaatatcaccacgaagtgacgtcggagtttttcggtcgcgtgctggcccagctgcatcgcgaccgcgcccgcgtcatgatggcgcttcgcttgcccgagcagacggtgtgccacctgagcaccttcgttctcagtcgcttcaagcgacaggtactgtacttcaagttacaggtgagctacggcaagtgccggactggccacgctgacagaagtgggggaggggggaacggtggaaatcagggacaccacaacctactgtgttatcgacgccttagcgtcacatttgccgacacagacacggtgtggagaaaccttttctacgtttattacgaactagctcgggatctggggtcccatgggacagagaaccgacccgtaaaccgcggttacggtgtttcttgcgctccgaggacgtcgcggctatcaccgtcagaatcgacggtggtttcggcgaacggacacgcgctgtcttccaccgcgctcccgacgacgagcgcgggtcacaagctgtcactgccgcgcgacccggccgccgatcgcgttcgacgttacgtgtgcattatctcgcgtctcatgtacgctcggtacggggagagatggcgtaaacaccgtcaacggcggtcggagacgggagaagaggaggaggaagagacgctggaatcgggggagactgacgccacgccgccatttgactttacggggcagcagctgcgccgggcctatcaggaacaccgacgtcgtaaacatctagccgtgcagcgttacgcgccgtgccgtcgtaagctcatcggcgggatggagtttgccgaggtgacgggcgtgagtctggaccgcatcgccgtcaacgctttcaacaccaaccgcgttatcaatatgaaggccgcgctctcgtccatcgccgcgtcgggtctcggcgtgcgcgcgccgcggcttcccaagaacatgacccacagttttgtgatgtacaagcacacctttaaggagcccgcttgcaccgtcagcacctttgtttccaacgacgccgtctacatcaactcgctcaacgtcaatattcgcggttcctaccccgagtttctgtactcgctgggcgtgtaccggctgcacgttaatatcgatcacttttttctgccggccgtggtgtgcaatagcaactcctcgctggacgtgcatggactggaggaccaggcggtgatccgctcggagcgcagcaaggtgtactggaccaccaactttccgtgcatgatctcgcatactaacaacgtcaacgtgggctggttcaaagcggctacggccattgtgccgcgcgtctcgggcgctgacctggaagccattctgctcaaagaactctcgtgcatcaagaacatgcgcgacgtgtgcatcgattacggtctgcaccgcgttttcacgcaactagagctgcgcaattcgtaccagatccccttcctggccaagcagttagtgctgtttctgcgtgcttgcctgctcaagctgcacggtcgagagaagcggctgcagttggaccgcctagtatttgaggcggcacagcggggtctctttgactacagcaagaacctcacggcgcacaccaagatcaagcacacttgtgcgctcatcggcagtcgtctagccaacaacgtgcccaagatcctggcccggaacaaaaaagtcaaattggatcacctgggccggaacgccaacgtgctgacggtgtgtcggcacgtggaagcccacaagatccctcgcacgcgcctcaaagtgttagtcgaggtgctgggcgcgttgcagagtatcagcggtacgccgcacacgcgcgaagtgatccaccagacgttgtttcgattgtgctcggcggccgcagccacatcgggcctgtgttcatcccctcccccattgtgtgtgtcctcatcttcctccgtcccctctgtcccaacctccgtcagcgttgacggcagttctgaacccacgtcgccgcgagcgcggtttgcatcacgatgatggaagccgcggccgctgccgccgcggcgtttcgtccggaggagcgtccgacgccgggttggcacgacgcggcgttgttaatggacgacggtacggtgcgcgagcacgcgtttcgcaacggaccgctgtcgcaactgattcgccgtgtgttaccgccgccgcccgacgccgaagacgacgtggtttttgcatccgagctgtgtttttattgcagcggtcgttttaaccgcaggtcgtccgtcttctccatctattggcagaagcatagcgatctggtgtacgcgcttacgggcattacccattgcgccaagttggtggtggaatgcggtcagttggggagtagtaggctacggtggcgcgacggtgatgcgagtggtgaggagcgccggggagacgacgacagcagggacgagctgtacgacgtgccgggcatttatatgattcgcgtcaacgacggcggcagcaccggtcccagacacgttatttggccgggtaccagcgtgctttgggcgccggacgttgtgatcactacggtgcagcgacgaatctcggcggcgcgcgccctggtgaacacgttccgccaatatttttttttgctggaacggcgctcgcacgaggagctggttctttgtccgcccgagatggaggagcgtctagcgccgttgttgcagagtgccacgcgcggtgattcggacatgtttgacggtgtggtggccagcgcttatcaccgtttgcgaatgagtaatattccgcgttcatccgcccgtctgctggagcactgcgtggggctggcgggtgctaagaagctgctcttgctcgacgtgccgcgtctggagaactattttctttgtcaggtctgtctttacgagctggacgaggacgagatgggcgaggagatgctgggcatgttggccggaaagcccgaggatgccgccgtctcgggcgcaagcggcggttttctgctacatcgcaagacgatgaagctggccgcctgtctgtgtttgttgctcaattcgctgcatttgcaccaggaggcgctggaggccttggatcctccgccgccgcgcgtcgaggagaacgaccttgtcaacgtggtgctgcgccgttattatcgcagtcacggcggcgtgcaggcgcggacgctggcggcggcccgggctttgttagccgactacgctgaaacgttttcgcctttggggagttttacgcgcctgggttacgatcgtctcgtttctgccgatgccggcgtcagtcgccggcacctggtggctctgctgcgtgcctagctgaccctgaaacggatggcgtgtatatcgtcacacaggtaggtggccatgatgacggcgatgataagatcgtccgagatacgattctggcgcttggccgagtagcgtgccgtcgtgccttcggccagcgtgacgcggtgcaggttctgaatctgctccagaagatactcgatggggtcgtggctcagcttgatggtgtaggagacgagctcttgcgaggctttgatgtagcccgagttgaaacgcgagatgaactgttccacggccagcgccttgtcgcggcccatgaggtagaagggctgttcgatgtggttctggtcgggcgtgtggtagaagagcacgcggatgagcgtgctgctctgcacgctctgtcggatgaggcaggcgatgcgcacggccgccgcctggttggtgttgccctccacggcgatacgcagttcgtccaggtaagggtgcaggctcagcaccgagatgatcatgtgcgccgcgcactcggcgatggctacctcagaactctcggagaggtcgcgcaaaaagaaatgctctaggccgtaaatgagaaactggtgtcggtaggcgcctacggccgccacgcccgtgcccgaggccttgcggttggtggtgaaggccgggtccagatacacgtaaagcgtcttgccgaaataatcgtaggcgttggtgttgagcgtgctgtaacgcaaaatatcgaactcttcgcggctctggtccgtgatgagcacggtgttctgcgagattttattggtaccgccgatgatctcgtccatgaaagcgcccggcataaacatgttggccgtcttgcgcacctgcgagttgaggctgatgaaggtgggcttgtgcagtcggtagcaaggacacgccgtggcgtcgcccttctccgtgaagctgtgcaggtgctcttcgcacacgtaagagaccacgttgagcatgtcaaagggcgcattgttgaggcgcgtcaagaaacacgtggcgtcactggtagtgttggtggacgatatgaagatgatcttggtggtattctgggccaggaaccccagaatggtgttgaaggcctctttcttgatgaagtgcgcctcgtccaccagcagcaagtggaagttttgtcctcggatgctctgtgtagagaggagacagaaaagggactcttataattacgcacgctcggctggaagcctacagagtcggggtggggccggacaggtgagccaggtgagccgccaggtgaggcgggatcaccgtgtgccaaccgggctgcgacctgaaaaccggaaccaatccgccgacaccggcgccgcgtgacgcgcgcccataaaaacgaaagtgtcgtcgtcgcgacccgccacagccgccatgaactcgttgctggcggaactcaaccgactgggggtcgcgcacgccactacggaggatgtttttatctttgtcgaccgcctctttcaacacttttccttccttttccaggccgaggagtcaggcccgcgccgcttggaactggtcgcgtccgtgttcgagcacctgacggtggagtgcgtcaacgacatcctggacgcctgcagccatccggacgtgaacgtcgcggagacaagcaacacctgtcgtccctgcccttctcctgccccctccgcccccaaaactgtcagcgacgctcagacgtcatgtgcgacgcctcgggcgcctgtgacatgaggcacgtccagaacgcgtttaccgaggagatccagttacattcgctctacgcgtgcacgcgctgctttcgcacgcacctgtgtgatctgggcagcggctgcgcgctcgtctccacgctcgagggctccgtctgcgtcaagacgggcctggtatacgaggctctctatccggtggcgcgtagccacctgttggaacccatggaggaggcctcactggacgacgtcaacatcatcagcgccgtgctcagcggcgtgtacagctacctcatgacgcacgcaggccgttacgccgacgtgatccaagaggtggtcgagcgcgaccgcctcaaaaagcaggtggaggacagtatttacttcacctttaataaggttttccgttctatgcataacgtcaaccgtatttcggtgcccgtcatcagccaactttttattcagcttatcatcggtatctactcaaagcagaccaagtacgacgcgtgtgtcatcaaggttagtcgtaagaagcgcgaggacgcgcttctgaaacagatgcgttccgaatatggaaacgcacctgtattcggatctggcgtttgaagcgcggttcgctgacgatgagcaattgcctctacatctggtgctcgaccaggaggtgctgagtaacgaggaggccgagacgctgcgctacgtctactatcgtaatgtagacagcgctggccgatccgcgggccgcgctccgggcggagatgaggacgacgcaccggcctccgacgacgccgaggacgccgtgggcggcgatcgcgcttttgatcgcgagcggcggacttggcagcgggcctgttttcgtgtattaccgcgcccactggagttgcttgattacctacgtcaaagcggtctcactgtgacgttagagaaagagcagcgcgtgcgcatgttctatgccgtcttcactacgttgggtctgcgctgccccgataatcggctctcaggcgcgcagacgctacacctgagactggtctggcccgacggcagctatcgtgactgggagtttttagcgcgtgacctgttacgagaagaaatggaagcgaataagcgcgaccggcagcaccagttggccacgaccacgaatcaccgtcggcggggcggactgcgtaataacttagacaatgggtcggatcgccgtttgcccgaagcggctgtggcttctctggagacggccgtcagtactccattttttgaaattccgaacggagcaggaacctcctccgcgaacggcggcggcagattcagtaacctggagcagcgggtagcgcgtttgttgcgcggcgacgaggaattcatctatcacgcgggtccattggagccgccttccaagatacgcggtcatgagttggtgcagctgcgcctggacgtaaatccagacctcatgtacgccaccgatccgcacgaccgcgacgaggtcgcgcgtacggacgagtggaagggtgccggtgtctcgcgtctccgcgaggtctgggatgtgcagcatcgcgtgcgcctccgtgtgctgtggtacgtcaattccttttggcgcagtcgcgagctgagctacgatgaccacgaagtcgaactataccgggcgttggacgcttatcgggcgcgcatcgccgtcgagtacgtgctgattcgcgccgtgcgcgacgagatctacgctgtactacgacgggacagcggcgcgttgccacagcgtttcgcctgctacgtgccacggaacatgtcctggcgcgttgtttgggaactttgccgtcatgccttggcgctctggatggatcgggcggacgtgcgtagctgtattattaaggcgctaacgcctcgtctgagccggggtgccgccgctgccgctcagcgagctcgtcgccagcgcgagcgctcggcgcccaaaccgcaggagctgcttttcggaccgcggaacgagagcggtccgcccgccgaacggacttggtacgctgacgtggtgcgctgcgttcgcgcgcaagtggatttgggcgtggaagtgcgcgcggcgcgttgtcctcgcaccgggctttggatcgtccgtgatcgtcgcggacgcttgcgacgttggctctcgcaggccgaggtgtgcgtgctctacgtcacgccagacttggacttttactgggtgctgccgggcggctttgccgtctcttcgcgcgtcactcttcatggcttggcgcagcgggctttgcgagaccgattccagaactttgaagcagttcttgcaagaggaatgcatgtggaagctggtcggcaagagccggaaacaccgcgagtatcgggccgtcgcttgccgttcgacgatctttagtccggaggacgacggctcgtgtatcttgtgccaattgctgttgctctaccgcgacggcgaatggatcctctgtctttgctgcaacggccgttatcaaggccactatggcgtgggccacgtacatcggcgtcgtcgacgcatctgtcatttacctaccttgtaccaactgagcttcggaggtcctttgggtccagccagcattgatttcttgccaagctttagccaggtgaccagcagtatgacgtgcgatggtattacgcccgacgtgatttacgaggtctgcatgttggtgccccaggatgaagccaagcgcatcctggtcaagggtcacggtgccatggacctgacctgtcagaaggcagtgacgctaggcggcgccggcgcctggttgctgccgcgtcccgaaggctacacgcttttcttttacattctgtgctacgacctgtttacctcatgcggcaatcggtgcgatatcccttccatgacgcggctcatggcggcggccacggcctgcgggcaggcgggttgcagcttttgcacggatcacgagggacatgtagatcccactggcaattacgtgggttgcacccccgatatgggccgctgtctttgttacgtgccctgtgggcccatgacgcagtcgctcatccacaacgatgaacccgcgacttttttctgtgagagcgatgacgccaagtacctatgcgccgtaggttctaagaccgcggcgcaggtcacactgggagacggcctggattatcacatcggtgtcaaggattctgagggccgatggctgcccgtcaagaccgatgtgtgggacctggtcaaggtagaggaacctgtgtcacgtatgatagtgtgttcctgtccggtgcttaagaacctagtgcactaacggggtctgacagttcacggggagaagaaacaagaaataacaaaaaaaaaaagaggacatggactcgccacggtttgtggcaaggcgtatgttatcatcatggagctactcacgttggtgttgtagcaactggcaaaaagcgccgtgctcttggcgccgcggtggtcgatgctgatcacgttgtccttgttctcgaccacgtagtcgcgcgcgaaggtgtggcggcagcggaactcgacctctttgagcacaaactgcgacacgtgcttttggtgcgccacgtagccgatgctgatgccgatcatgtgcttaagcagaaacgagataatggggatgatgaaccaagtcttgccgtgacgtcgcggcaccaggaacacggtggctttctgcttaaagatgtcgatggaggtctgcgagaggaagtcgatctggaaggcgtggatgaggtactgcagcacgcgattggccagcacggggatcttggtcacggctataaaaaagatgacgtgtatcaataaattcttttgaaacggttcgagtcggatggcttttgcgtcgccctcgacggcggtactgaagccgccgtcgagccactttttaaagtcggtcatgaagttgttgatctgctgaaactgcggatcgcggtagagctcggtcaacgcgtccagcttctggtaggaggcgcgctgctcctcggagcacgggcgaaacgtcagttcatcgagcgcgctcttgaggcgctcgtgaaacagcagctcgcgctggctttcctcgggcgagttgtagtcgcggtggcggccgcagaaggccatgagcggcaggaaggcctcgttgcacgagtgggccagcccgagttcggggtgcatcatctggtagcgcttgcggcacagcgccgccacattggtgaaggccgtggagatgcaggaggtggggtggctcttgcgcttctgcagctccgcgtagcgctcctggatcttggcggccgaatctccgcgcaacatgatggcggcggcggtggtgcgagcggaggttaggcggcagcggcgagaggagaggaaaaagatggcgtccgcgaggacgacggaggatccacccgaaaaccacgttgtcgcggacgtggcttgtgggacgggcgccgtcactcgttcgtcttcgtcgtccttagtggtgtcgtcctcctcggcgtcaggctcagacgaatcttcatccgcctctcctctcagtttccccgtctcctccccctcaactgccgtcaggtctccggggtccgccggggtttcaacgtccctgtgctcggtggaacggatggtcgagctgtcggcgcagtctccggccgccgatttctcggtctccgaggcttggcgcttcgaggaggccgtaaatatggcgctggtggcctgcgaggccgtgtcaccttacgatcgctttcgcctaattgaaacgcccgacgagaatttcttgttggtcactaacgtaattccgcgcgagtcggccgaggtgccggtgttggatagcagtagcagcggtggcgatagcgggccggaggacaaaaagaaaaacgtcgggaataaaaccgcgggggaaaagaacggcggtgggtctcgggccaaacgccgtcgtagacgacgcgctccgaaaaacgacgccgccacgccgtcttttctacgtcgacacgacgtgctggagcgtttcgcggccgcggctgagcctttgccgtcgctttgtgtgcgtgattatgtgttacgcaatgctgaccgtgttacctacgacggcgaattaatctacggcagttacctgttgtatcgcaaggctcacgtggagctgtcactctccagcaacaaggtgcaacacgtggaagccgtgctgcgacaggtgtacacgccgggcttgttagatcatcacaacgtgtgcgacgtggaggccctgctgtggctgctgtactgtggaccgcgaagcttttgcgcgcgtgacacctgtttcggtcgcgaaaagaacggctgtcctttccccgcgttgttgcccaaactcttttacgaacccgtgcgggactatatgacctacatgaatctggctgagctgtacgtctttgtttggtatcgcggctacgaattccctgcgccgacgccgcaggcgacgacggcgggtggtggtggtagtggtggcggcggcggggccggcgcttgtgcggtcgagacgagcgcgtcagcaggccgggtcgatgacgccggcgacgaggtgcatttgcctttaaagcccgtctcgctggaccgtctcagagaggtattgcaggcggtgcgcggccgcttctcggggcgcgaggtgcccgcctggccggcctcgtcgcgcacctgtttgttgtgcgcgctctacagtcagaaccgtctctgtttagatctcgcgcgtgacgaggcgcggaccgtgagttatagccccatcgttatccaagactgcgccgcggctgtcaccgacgtcactttgagccacatcttgcccggccagagcaccgtctcgcttttccccgtctaccacgtcggcaagttgctggacgctctctcgctgaacgacgcgggtctcatcacgttgaatctatgacgtcggtcaacaaacagctcttaaaggacgtgatgcgcgtcgaccttgagcgacagcagcatcagtttctgcggcgtacctacggaccgcagcaccggctcaccacgcagcaggctttgacggtgatgcgtgtggccgctcgggaacagacccgatacagtcagcgaacgacgcagtgcgtggccgcacacctgttggagcaacgggcggccgtgcagcaagagttgcaacgcgcccgacagctgcaatccggtaacgtggacgacgcgctggactctttaaccgagctgaaggacacggtagacgacgtgagagccaccttggtggactcggtttcggcgacgtgcgatttggacctggaggtcgacgacgccgtctaacaggtatagcaatccccgtcacgcctctgttcatattttattaaaaaaaaacacaacataacgacagtgtcggtgtggtagctagtgcagccctaggaacagggaagactgtcgccactatgtcctccgcacttcggtctcgggctcgctcggcctcgctcggaacgacgactcagggctgggatccgccgccattgcgtcgtcccagcagggcgcgccggcgccagtggatgcgcgaagctgcgcaggccgccgctcaagccgcggtgcaggccgcgcaggccgccgccgctcaggtcgcccaggctcacgttgatgaaaacgaggtcgtggatctgatggccgacgaggccggcggcggcgtcaccactttgaccaccctgagttccgtcagcacaaccaccgtgcttggacacgcgactttttccgcatgcgttcgaagtgacgtgatgcgtgacggagaaaaagaggacgcggcttcggacaaggagaacctgcgtcggcccgtagtgccgtccacgtcgtctcgcggcagcgccgccagcggcgacggttaccacggcttgcgctgccgcgaaacttcggccatgtggtcgttcgagtacgatcgcgacggcgacgtgaccagcgtacgccgcgctctcttcaccggcggcagcgacccctcggacagcgtgagcggcgtccgcggtggacgcaaacgcccgttgcgtccgccgttggtgtcgctggcccgcaccccgctgtgccgacgtcgtgtgggcggtgtggacgcggtgctcgaagaaaacgacgtggagctgcgcgcggaaagtcaggacagcgccgtggcatcgggcccgggccgcattccgcagccgctcagcggtagttccggggaggaatccgccacggcggtggaggccgactccacgtcacacgacgacgtgcattgcacctgttccaacgaccagatcatcaccacgtccatccgcggccttacgtgcgacccgcgtatgttcttgcgccttacgcatcccgagctctgcgagctctctatctcctacctgctggtctacgtgcccaaagaggacgatttttgccacaagatttgttatgccgtggacatgagcgacgagagctaccgcctgggccagggctccttcggcgaggtctggccgctcgatcgctatcgcgtggtcaaggtggcgcgtaagcacagcgagacggtgctcacggtctggatgtcgggcctgatccgcacgcgcgccgctggcgagcaacagcagccgccgtcgctggtgggcacgggcgtgcaccgcggtctgctcacggccacgggctgctgtctgctgcacaacgtcacggtacatcgacgtttccacacagacatgtttcatcacgaccagtggaagctggcgtgcatcgacagctaccgacgtgccttttgcacgttggccgacgctatcaaatttctcaatcaccagtgtcgtgtatgccactttgacattacacccatgaacgtgctcatcgacgtgaacccgcacaaccccagcgagatcgtgcgcgccgcgctgtgcgattacagcctcagcgagccctatccggattacaacgagcgctgtgtggccgtctttcaggagacgggtacggcgcgccgcatccccaactgctcgcaccgtctgcgcgaatgttaccaccctgctttccgacccatgccgctgcagaagctgctcatctgcgacccgcacgcgcgtttccccgtagccggcctacggcgttattgcatgtcggagctgtcggcgctgggtaacgtgctgggcttttgcctcatgcggctgttggaccggcgcggtctggacgaggtgcgcatgggcacggaggcgttgctctttaagcacgccggcgcggcctgccgcgcgttggagaacggtaagctcacgcactgctccgacgcctgtctgctcattctggcggcgcaaatgagctacggcgcctgtctcctgggcgagcatggcgccgcgctggtgtcgcacacgctgcgctttgtggaggccaagatgtcctcgtgtcgcgtacgcgcctttcgccgcttctaccacgaatgctcgcagaccatgctgcacgaatacgtcagaaagaacgtggagcgtctgttggccacgagcgacgggctgtatttatataacgcctttcggcgcaccaccagcataatctgcgaggaggaccttgacggtgactgccgccaactgttccccgagtaaccgggacgcggaacgtgacggttgctgaggggaaaggcaacagagaaggtacaaacccaccggcggggaaaataccgaggcgccgccatcatcatgtggggcgtctcgagtttggactacgacgacgatgaggagctcacccggctgctggcggtttgggacgatgagcccctcagtctctttctcatgaacacctttttgctgcaccaggagggcttccgtaatctgccctttacggtgctgcgtttgtcttacgcctaccgcatcttcgccaagatgctgcgggcccacggtacgccagtagccgaggactttatgacgcgcgtggccgcgctggctcgcgacgagggtctgcgcgacattttgggtcagcggcacgccgccgaagcctcgcgcgccgagatcgccgaggccctggagcgcgtggccgagcggtgcgacgaccggcacggcggctcggacgactacgtgtggcttagccggttgctggatttggcgcccaactatcggcaggtcgagctcttccagttgctggaaaaggaatcgcgcggacagtcgcgcaactcggtgtggcatctgttgcgtatggacacggtctcggccaccaagttctacgaggccttcgtcagcggctgtctgcccggcgccgcggcggcggacggttcgggtggcggcggctcgcactacacgggctcgcgcgccggcgtctcgccgggcatccagttcggtatcaaacacgagggcttagtcaaaacgctggtggaatgttacgtgatgcacggacgcgagccggtgcgcgacggcctcggtctgctcatcgaccccacgtcggggctgctgggcgcttccatggacctgtgcttcggcgtgctcaagcagggcagcggtcgcaccttgctggtggaaccgtgcgcgcgcgtctacgagatcaagtgccgctacaaatatttgcgcaaaaaggaggacccctttgtgcagaacgtgctgcggaggcacgacgcggcggccgtggcctcgctgttgcagtcacacccggtgccgggcgtggagtttcgcggtgaacgcgagaccccgtcggcacgcgagtttctgctttcgcacgacgcggcgctcttcagggccacgctcaagcgcgcgcgcccgctcaagccgcccgaaccgctgcgcgagtacctggccgatctgctgtatctcaataaggccgagtgttcggaagtgattgtgtttgacgccaagcacctgaatgacgacaacagcgacggggacgccacgaccactattaacgcgagtctcgacctagccgcgggcgacgccgctggcggcggcgctgatcaccacctgcggggcagcccgggcgattcgccgccgccgatacctttcgaggacgaaaacacgcccgagctgctgggccggctcaacgtgtacgaggtagcgcgcttttcactgccggcttttgtcaatccgcgtcaccagtattactttcagatgctcattcagcagtacgtgctcagccaatactatataaagaagcatccggacccggagcggatcgatttccgtgacctgcctaccgtctacctggtctcggccatcttccgcgagcgcgaggaaagcgaactgggctgcgagttgctggccggcggtcgcgttttccactgcgaccacattccgctcctgctcatcgtcacgcccgtggtctttgaccctcagtttacgcgccatgccgtctctaccgtgctagaccgttggagtcgcgacctgtcccgcaagacgaacctaccgatatgggtgccgaactctgcaaacgaatatgttgtgagttcggtaccacgcccggtgagcccctgaaagatgctctgggtcgccaggtgtctctacgctcctacgacaacatccctccgacttcctcctcggacgaaggggaggacgatgacgacggggaggatgacgataacgaggagcggcaacagaagctgcggctctgcggtagtggctgcgggggaaacgacagtagtagcggcagccaccgcgaggccgcccacgacagctccaagaaaaacgcggtgcgctcgacgtttcgcgaggacaaggctccgaaaccgagcaagcggtcaaaaaagaaaaagaaaccctcaaaacatcaccaccatcagcaaagctccattatgcaggagacggacgacctagacgaagaggacacctcaatttacctgtccccgcccccggtcccccccgtccaggtggtggctaagcgactgccgcggcccgacacacccaggactccgcgccaaaagaagatttcacaacgtccacccacccccgggacaaaaaagcccgccgcctccttgcccttttaactcataaactttcaggtctcgcgtacgattcgcgagtcgggaatgggacacccgtgggtgtttctccgtgtgtatattatttttttttgtgtgtgtgtgtgtttgcgcccccgtgtgtctaatgtgctgtttgaaacacgtaaagtagctggtggaagaacagataaacctttaataaaaaaaaagtatgtgctcccgacccacggtctgcgtgtctcttttttatgtccatgtctccaagtctggtgcgggtggcggcggggtcaagcgtcctcgaagtcttcatcatcgtcgtcgtcctcttgttcgcggaggcgacggctttccaagctgtcgtggtgactgagcgcagcgacttcttcgccggaggctgtggccagcgcctggtacttgacactgccgctaccgcgtccgcgaaagtagcggacggcgcgacacgtcgtaaacatggcccatatgaaaaagagcatgccgaacgaccagctgatgccggtgcggtattcgttgctgaggaaggtatcgtactgcacgatggggtagatgaggccgcagagtccaaagaaggcgcccaggtggtagccgaattgcaccttgacgtattgaaaaaagacggcctcgatcagtaaaaagtagatgatggagatgatagcgtagaccacgaagacggctaacaccatgtggcctgtacgcacgaaaaagttgtttccgaagccgtagcacagggccatggctaccacggtggtgttgaaaccaagcgctacctccaccaggttgacgatgagcgtgcggaactgcaccgtacctttgagcttggggtgcagacgcgagaagaaaaagagtgagcgtttgtagctgcggtactgcgtgaccatgctcacgttgaaaatggtcaggcagaaaaagtgcacggcggccatgaaggcgatcatgctgggcagccgaaatgacatggtcagtgtgaatagttggaacgtgtccatgctgagaatgaagaggaaggctgtgaggctgtcgcccatgtacgaaatgtcgcgtgtcgactggtttaggctcatgcctttgtccttgcgcatgctgatcttgatccagcataccaggtagtagatggtcacggctaaaaagacgagctgcatgaacacggcgtagcacaccaactgcaccgagtctaagaaaagcataggcgtgtgcaggtgcattacgttgtaggccgacatgttgagcctttcaaagtccacgacgtgatagtagacgcaggggtagcccaggtgcggaaaattgctcagcactagatgcacgctgacgttgacaaaagtgagcaccatgaaaacgatagaagcgctccatgtccgtgtattcactttatccacgtgcgagggggccatggcgatagcggcggcccgctcgctcgggaggcgatgggggcgcgccgatgacgacaggctcgcgggtcgttaaatactacgatgggagccgccgcggctcacgacgcggtttgagcacgtccgggcgatcggtgaaaaaagaccccgcgggccttcgcgactctcttctgtccgaggatgaccgctcagccgccgctgcaccaccgccaccacccgtacaccctgttcgggaccagctgtcatctcagctggtacggccttctggaggcctcggtgcctatcgtacaatgtctgtttttggatctgggtggcggccgtgccgagccgcggcttcacacgttcgtggtgcgcggtgaccgtctgccgccggctgaggtgcgtgctgtgcatcgtgccagctacgccgcgctggcctcggccgtgactacggacgccgacgagcgccggcgcggcctagagcagcgtagcgccgtgttggcgcgcgtgttgctagaaggcagcgcgttaatccgcgtgttggcgcgcaccttcacgccggtgcagattcagacggacgctagcggcgtggagattttggaggccgcaccggcactgggcgtggaaaccgcagcgctatcgaacgcgcttagtcttttccacgtagccaagctagtggtcatcggctcgtatcccgaagtgcacgagccgcgtgtggtcacgcatgccgcggaacgcgtctccgaagagtatggcacccacgcgcacaaaaaattgcgtcgcggttactacgcctacgatttggccatgtcgtttcgcgtcggcactcacaagtatgtgctggagcgcgacgacgaggccgtcctggcacgcctctttgaggtgcgcgaggtgtgttttttgcgcacctgtctgcgtctggtcacgcctgtcggtttcgtggccgtggcagtgaccgacgagcagtgttgtttattgctgcagtcggcctggactcacctttacgacgtgcttttccgtggtttcgctgggcagccgccgttacgcgactacctggggccggacctttttgagacgggcggcgcccgttctttcttttttcccggtttcccacccgtgcccgtctacgcggtccacggtctgcacacgttaatgcgcgagacggcgttggacgcggcggctgaggtgctctcgtggtgcggcctgcccgacatcgtgggctcggccggcaagctggaggtggaaccctgcgcgctctcgctcggcgtgcccgaggatgagtggcaggtcttcggcaccgaggccggcggcggcgccgtgcgtctcaatgccacggcttttcgcgagcgaccggccggcggcgatcgtcgctggctgttgccgccgctgccgcgtgacgacggcgacggtgaaaacaacgtcgtggaagtcagcagcagcaccggcggtgcgcacccgccgagcgacgacgctactttcaccgtgcacgttcgcgacgccacgctacatcgagtgctcatcgtggatttggtcgagcgcgtgctggccaagtgtgtacgcgcgcgcgacttcaatccctacgtgcgttatagtcatcgactccacacttatgcggtttgtgaaaagtttattgaaaatctgcgttttcgctcgcgacgcgccttctggcagatccagagtctgctgggctacatctccgagcacgttacgtcagcctgcgcttcggccggccttttgtgggttctgtcgcgtggacaccgcgagttttatgtctacgacggctattcgggtcacggacccgtctcggccgaagtgtgcgtgcggactgtggtcgactgttattggcgcaaactttttggcggcgacgatccgggtcccacctgtcgtgttcaagagagcgcgcccggcgtgctgttggtttggggcgacgagcggttggtgggtcccttcaacttcttctacggcaacggcggcgccggtggtagtccgctccacggggtggtgggtggtttcgcggcgggacattgtggcggcgcttgttgcgcgggctgcgtcgtcactcaccgccattctagcggtggcggcggcggtggtggtggcgtgggcgacacggaccacgcgagtggcggcggtctagatgccgctgccgggagtggtcataacggcggtagtgatcgggtttctccctccacgccgcccgcggcgttaggtggctgttgctgcgcggccggtggcgactggctctcggccgtgggtcatgttctgggccggctgccggcgctgttacgggagcgcgtgagcgtgtccgagctggaagccgtgtaccgcgagatcctctttcgcttcgtggctcgccgcaacgacgtggacttttggttactgcgcttccagcccggtgaaaacgaagtaaggccgcacgccggggtgattgactgcgcgcccttccacggcgtgtgggccgagcagggccagatcatcgtacagtcacgcgatacggcgttagcggccgatatcggctacggcgtctatgtggacaaggcctttgccatgctcacggcttgcgtggaggtctgggcgcgagagttattgtcgtcctccaccgcttccaccaccgcttgttcttcttcttccgttctctcttccgccttgccgtccgtcacttcgtcctcttcgggcacggcgacggtgtctcctccgtcttgttcttcttcgtcggcgacttggctcgaggagcgcgacgagtgggtgcgttcgctggcggttgacgcgcaacacgctgctaagcgggtggcttccgagggcctgcggtttttccggctcaacgcttaacgagtcacgtaggggaactacgtgggtaagtgacgtggatactagtaaaaaaagtgcgtcaaagttctcagcgtgtgacgtggatactagtaaaagggacgtcaaagctcactacgtgttgcgtgttttttttttttctatgatatgcgtgtctagttcgcttctcactcttcctctccccgttcccagcgcggtggcagcttggggggtgagggcaaattggggtagttggcgttgagcacgtctagcaggcccaggcccacgggccaaccgtccacggtcttacgctcggtcagcttgaggctaaacgagtgtgcctcgtcttgaccggtaaggcggaaaaagaagcgtgctaccagctgcaggcaggtatgccgcgtctgctggaagagcacgaaggtagcgggcacgtactgcacaatgtgcggttctttttcctcaaagagtaggtagagcgcgctgcagatcagccgccgggcgctgtggtgcagcagccggccgaagctttcgcgcacgttcactgcgtccaggtactggagcaggtcgtgcaggcacttgcgcgttaagttgcaattttccacgcatgaaataacggtacagagcgcgaagtgcagcaggttgtcggccttgacgatgccgcagcggtgtttgagccgcagatccgagagcctcacctgcgtgacgacgtcttcggtctcgagcaaaaacacggcggagtagcccagaaaggccgaggtgcacagcaactcgctgcggtactcggccatggaaaccagcagcccgtgctccgtgtgcagccacagcttgtcgccgcgcaccgtaaagtcgagcacttgcggctccatgatcatcacattctgtctagtgaaatccgtatggacctccagcacgccgcggatcatcagggcctccatttcgaaatcggccgacacgctctgggccgcgccgctcctcgtctgccgtgatcaagcggcgcggcgcggacctttcaagcgttcctgggccgccgctcgaggcagttcccctttctggcactccgcccgccgcttcgcggctcatttggcgccggcgcgccttctcgcggctgcaaatcagctccacgtatcggcaaaacttgctgtcgtcgtaggcggcggccacgatctcgccgaaggagagctgcaggtaggcttcgggtacggggtccagcgtgcctagcgccaggatgtgacacagatagggcagggtcacgcgctctaccgtgtaattggagtagacgatggcctcttcggccccttgatgcgtgaccagacgccgtaggcgaaaggtgcggaaatactcgttttcccacaactgcgtgaggaagcgttctagcgactcggtgccaggcacgaactgcgagaagaagctgttggccaccaggcggttgtcttccaccgccagcggacggaagggcgccgcgtcgcgcgccttgcgcacggcctccaacacgggcaggtggtagagttcggcgtcgcgcgcgcccaggctcatggagtcctcgcgccgcgaggcgtagcgcgtgagcaggtcgcgcagctcgcgcacgcgattctcccaggtctggttgagcgtgcgcaggtcctggatctcgtccacctgcgactggatctgctcctccaggcacttgatgacctgcttcttaaacaggtcgcggatgtcccgctcgggcgccgccgggccgggtggcggcggcagcagcccgacgtggcccgcgggtcctcccaccacggcgccgccgggtcccaccacgccgggtccacccggaccacgcgcgggtagtagacggttttggtccaccagcgagggggtcaggtcctgcagaaaggactcgacgctgtcctcgatgccgatgcgcgatttgctgtccgagacgttaagcaaaaacttcataatggactttttggcgtcgctgccccggtcgtgctgctccatcatctccaccagcttcttgcagttgagctcgtggcggctggcggtcaccactttcacaggaaaggtattgagcagctggcagatcttttggtggcggcagagcccgtcgtagcgcagaatctcctcgtgcaggtgtgccaccggcgtggtgaacagcagcttgtcgcgctcataagccagcggttcggccgccacgtacaagcggatgtgcttgccgcgcagctgcgcctccagccgctccgagcgcaccttcttgaagacgcgtacctcgggcgcgttggctacgcgcacggcgcccaggcgctcggccacctgcagcagcagcgccaggttagcctgcagcaggtcctgcgccagcgggtgtgtctcggtggcccgctgcacggccgcgcgtacaaattgcgcccgctcggccgcctcgctcggcttggttttcacgtccagcagcggtaccagtcccaccgttacgcaccaatccacgtagagaccatagtcgtcgttatcggcgtactgatataaaatgtcgcggagcgcgcccagcacgcccgtttgcacgctctggcgcaacgaggcgctccacaccaacagatactgctccaggtcctcttcgtccagcgcgcggtagggaaacagcgccgcgtgtaacttccactcctcggccacgcgccgcaccgtgatggtgtcaaagagcgtcttgcacactccgtagagcagctgcttgcgcagcacgcacgggtcgcgcagcacctggtgcatgctctggccgcgacacgtccccagaaagccgtgcagcaaccgcaggaagctcatcgtctggcccgtggggaaaatgtcgatgacggcctcgtcatccacgccgcggcccacgcccaagtacgacgacgccttgatcctcaacctctcgtcggctgccaagatcgaacggatcgtcgacaaggtcaagtctctctcgcgcgagcgctttgcgcccgaggatttttcgttccagtggtttcgctccatcagtcgcgttgaacgaacgacagataacaacccctctgccgcaactaccgccgcggcaacgacgaccgttcactcctccgcctcctcttctgccgccgctgccgcttcgtccgaggccggcggcacgcgcgtaccctgcgtcgaccgttggcccttctttcccttccgcgcgctgctcgtcaccggcacggcgggcgccggcaagacttccagcatccaggtgctggcggccaatctagattgcgtgatcaccggtaccacggtgatcgccgcgcagaacctcagcgcgatcctcaaccgcactcgctcggcgcaggtcaagaccatctaccgcgtcttcggtttcgtcagcaagcacgtgccgctggctgatagcgccgttagccacgagacgctggaacgctaccgcgtgtgcgagccgcacgaggagaccaccatccagcgcctgcagatcaacgatctgctcgcctactggccggtcatcgccgacatcgtggacaaatgcttaaatatgtgggagcgcaaggccgcttcggcctccgccgcggccgcggccgccgcctgcgaggacctctcggagctgtgcgagagcaatatcatcgtcatcgacgagtgcggccttatgctgcgctacatgctgcaggtggtggtgtttttttactacttttacaacgccctgggcgacacgcgactttaccgcgaacgccgcgtgccctgcatcatctgcgtcggttcgcccacgcagaccgaggcgctggagagccgctacgaccactacacgcaaaacaagagcgtgcgcaagggcgttgacgtgctctcggcgctgattcagaacgaggtgctcatcaactactgcgacatcgccgacaactgggtcatgtttattcacaacaagcgttgcaccgacctggactttggcgacctgctcaagtacatggagttcggtatcccgctcaaggaggagcacgtggcctacgtggaccgcttcgtgcggccgcccagctccatccgcaacccctcgtacgccgccgagatgacgcggctttttctctcgcacgtcgaggtgcaggcttacttcaagcggctgcacgagcagatccgcctgagcgagcgccaccgtctcttcgatctgcccgtctactgcgtggtcaacaaccgcgcgtaccaggagctctgcgagctggccgacccgctgggcgactcgccgcagcccgtcgagctctggttccgccagaacttggcgcgcatcattaactactcgcagtttgtcgaccacaacctctccagcgagatcaccaaggaggcgctgcgccccgcggccgacgtcgttgccaccaacaactcctccgtccaggctcacggagggggaggatctgtcatcgggagcaccggcggcaacgacgagacggcgtttttccaggacgatgataccaccaccgcgcccgatagccgtgagacgctgctcaccttgcgcattacctacatcaagggcagttcggtgggagtcaactctaaggtgcgggcctgtgttatcggataccagggcacggtcgaacgtttcgtggacatcttgcaaaaggacacgtttatcgaacgcacgccctgcgagcaggcggcctacgcctactcgttagtttcgggcctgctcttctcggccatgtactacttctacgtgtcgccctacacgaccgaggagatgttgcgtgagctggcgcgcgttgagctgcccgacgtgagttcgctctgcgccgctgccgccgccacggccgccgctcccgcttggagcgggggagagaatccgataaataatcacgtcgacgcggattcttctcagggcggccagagcgtgccggtatctcaacggatggaacatggccaagaggaaacccacgacatcccctgcctgtccagccaccatgacgactcggacgccatcacggacgccgaactcatggatcacaccagtctgtacgcggatcccttttttctcaaatacgtcaagccacctagcctggcgctgctttctttcgaggagacggtgcacatgtacactaccttccgcgacatttttctcaagcgctaccagctcatgcagcgtctcacgggcggtcgcttcgccacgttgccgctcgttacctacaatcgccgtaacgtggtgttcaaggccaactgtcagatcagctcgcaaaccggctccttcgtgggcatgctttcgcatgtgtcgccggcgcagacgtacacgctcgagggctacaccagcgacaacgtgctcagtctgcccagtgaccgccaccgcatccaccccgaggtggtgcagcgcggtctttcgcggctggtactacgcgatgcgctcgggttcctctttgtgctcgacgttaacgtctcgcgcttcgtcgagtcggcgcagggcaagagtctgcacgtgtgcaccaccgtggactacggcctcacttcgcgcacggccatgaccatcgccaagagtcagggcctgtcgctcgagaaggtggccgtggactttggggaccatcccaagaacctcaagatgagccacatctacgtggccatgtcgcgagtcacggaccccgagcacctcatgatgaacgttaacccgttgcgactgccctatgagaagaacaccgctatcaccccctatatctgtcgcgcgctcaaagacaaacgcaccacgcttattttttgacacaacaccgtgtaagcaaaacgtgactttattgagcagggtaaaaaccacgtacaagaaccacgttgtctatccccccaaaaaaaaacacaccgtcagggaacacatcgcctatagatagcggcactttacataaaaccaccgtacctgcatcacggtggctcgatacactggaaattcaataaaaaccaccgtgtccacgttacggtacttgccgggtcagcgtccttctcttgagatttctgttcgcaaacttatccgtttccccggtccgcggtgtctcctcgcgaggctgacagtctacgagtggtatctacaagagaaagaaacccgggtgggagcgacgccgtcgctgggtatcaaccccgcggctgaccgtcgtccggtaaaggaacaacccgtcgtcgcaagccgggttcgaccaagagaaaaaaacccgggtgcggggggagacgggtcgtcctttggtcgttcgcggacggcgtacatgccgcgtgggtcagtcgacggcgtcgctccgtgcggtcggtcatcattctgcttcacatatatgggttgtttgtgttttttttataatgaatacgcactcatcctatccgtgactgcgcgtgtggcagagaggatgccttataacatgtattttgaaaaattgccaacagctataatttctctcatgtagcagaatagagaccttttgtcgtctttttgtttgtcattacttgttttccagggaattagagagagggaaccgcgcctccggcggcggtgcccgcggaccccggccccttctcgcgtgcgcggtgtgactggttgagcgaatgagcagctaggcttggtggtgctccgcgtgcgggggagaagacgattaacaacaaaaaataagtggaagtggccggtgggtctttgtccgcgtgcgcgcccatccgtcgccgggaccgagcagaaagtgatgtggtggtacattgattttttccttgacaggaaagaaaaaaaagagttttgttttcctatgtgagaggagaaaggtatgtgaggagatgttcgatgatcgtatgttacagttatgctgtaaggaagcttttatcgtgcgtcctgtttttcatttgatgtatatgacacaattgaaacctatcgataggcgtatatcgaggattcatcaattcttagaatcgtcgtctttttggctaattggactttgcccatgttggttgtcattcgtggcctgaggtcatcgtcgtccacgacgacgtgtctatagcgtgcggtgtgatcattgtgtcgagccagagaaagcgcgcctcgcacgacgtttgcggatcggctcgcgggtgtgtggaattcctaagaacataatcagctggtcgtctttctttgatgtgttgttgtcgtcgaggtcttgcttcgttttcttttttctttttagtcgatggaacttttcttcggtacgggttcttgttatggaagcttgtgttttcgaacatgaattcgaaaaaataaaaaggcctatcttcgtttcaaaaaaaggacagatatcaatcttcttaacttatatcatggtaaattcagaatcctatggtgtcttattatctctaaagtagtcaacattatggtctaacttgtatttccctgacgagatatatatgatccttataacctggctactatcatgaacaacaatatccttacttacagtcatcttcgtgagttaatgaagtataatatcggtcatctatcaacttatctgctatgtaacgtacccttttaggtattttgcgtttcttaacgagtgtacccgcctgtgtgaggcgaaactctgagaagtctaccgagtcgagttacaagtcactaaaacacttacacgagttatctatactaaaatcactatctatgttgtttgcttacctaattattatcctacatgacgaagctacctcccaacgtaaggtagggggagaggagacagaacaataaaaagtaactaatgtttcttagaacttacccgctaaggacttaccaaactatattcaccaaaaaacaacagctacgtgtttcatttgttttaatctaccgaagtaaaaaaaaaaaagatgattagctatccagaacctacttacttcttaatgttttaactaaggatgcctatgggattggaaaaaaaatcacagcaacttgctactaatcagttgacagcgaagagactcataacaaagatttctgggtaatacggttataataatgcttatggactaaaggatacttggaaaaaaagaacgggctatgactatagagattcgtcgagatattaaacttcaaataggcggctatcattcatggttgtggtgactatatcgtggagaaaaaatgtgatcgttagttagctaggtgagacttacagctatccatccgtctagtttttcgttgtaatgatgatagtacgtctatggtggtgatcgattttggttaacaatttgttcgtttaaaggcttaatgtacttatgctacatgatgtattattctttgattcatcgttcctcctaagggggtgtatgtatgtatgtactagtcgtatagtgttcctaacatcatgattattcagactatggcttcatctatcgtgtctaaagttcacttattctactattactatatatatgcactactatgtaactaggatatggtcctataaggtgtcttctatcacggtggcttgtttatcgcttggcggttacgagcaagagttcatcacggaccagccgtgaggcagggcacacgcgggtcggcggcgatgatgtcccccgcgaaggggacaacaaaaacaagacaagaggccgccggccgcggccacggacgcgtagcggttacacaatgtttggttgagcgttttgtttcatcgtcgtggtggtggttttgttgttctctgtatatatcgtgtggtggctttatcgtcatcattattatcatcattcttgtttccatcatcacgatgagttttctccgttttcctctcctccagtggtagtcgtgtatcatcatcaatcatcgtagtgacgtcgttgctgctgctgctcttgccttcatggcggtatttctcttcctcccccctaaccccatattaactcgtgagtgtgatggttagagtggctgcttgtttttttttcttttctctttggaacaacaaaagaggataaagatggtcggtgaatgtattattattattatcatcattatgatacggtcgcggtcttcttctccgatgacgaaacctgcgcacatcgaagaaaagacgagcgcgcgaaccgatagccgtccgtctgggacgaaggagaagatgatggggagaggaggagagccccagaagccagagcgagaagggagacgacagacatacgtcgtcaccgtcctctggaggaggcacggcggcgctgtttgttgtttggatgcttgattatatcctgttctatggggtagattattatcaataggcttggttttcaaaggtcagcctgtgtattgtcgtgtcttttttttcgttctcatgatcgcggagaccacacagacgtgcgcgtctcccaatggctaggcgttctttttaggtagtaattttttgatcttttttttttcttaacaagtctggcttgatttcttttatctatgatcgattcttctttttctcgggggttgcatcttccgtgaaagtaaagtgacactactctaaatggtaaccatattatctgttgattaggagaaaaaataattttttcgcacgaaatcgatcctaagtgaggtgatttacttgctatcacacgaaatgattatcttttgctgctaacgtactgaattttttaacagaattgcttctccgtaactatttccgcagattcagacagattgtcaaaaaaaaatacggcacagaaatagtgggtctgtggcttttggttcgtgtacattcgcgtttgcgtgtcgagatttctacggtatgtttattcttcctgcgatgatgtagggtccttggtgtaagtaggatttcgagtatctctcttagagcgaacaaaataatcaaaaaacaacagctaggaaatcgagggttactctacgataaagtgtctctacaaagtgaagaatgttacgttgtggtggaataataagactcgcgtgatcgatgagtgatcgagagcggctcgaaccttctttaagagctttgtttagtgcaactttaaattacaaggagtagaaagctgaaatgaatctatgaaggtgctattctttgaatatcttactttgtacgcttcacattcgttatttggatagagagttgtctagagaaaatctgtgattctctatgagtgttatttttattatccttttggggactacgatttttcttcttgttctacataccactactactcgtaatcacatacatggacgaaaaaaaaattcgtcaggcagtagataccagattctccgacgttacggcgtctttttttcttttgagagagtatctgctgagattgtccgtggtgtatctagtcgctatttttgttgttactagtagttttgcacacagtttattcagtataatttttcttcttgccatgatcaattgagcccaccaccttttttttttagagaggaggaatttcgtcttgatctccagccggagacaacggcggcggtggtggtggcgggagagatttcaaggcaatgaaaaaaaaaatttcgttttgccatcaagtggtgacgataacccgtcagattgataattggttcctacagaaactattctaaccgcggaagaaagaaattgaaaaaaaaaattgacaaaaacatcataacataaaggaccacctacctgggacgcgcagttgggcggcggactggggcggcatgctgcggcgatgctgtcggtgatggtctcttcctctctggtcctgatcgtcttttttctaggcgcttccgaggaggcgaagccggcgacgacgacgacgacgataaagaatacaaagccgcggtgtcgtccggaggattacgcgaccagattgcaagatctccgcgtcacctttcatcgagtaaaacctacgttggtaggtcacgtaggtacggtttattgcgacggtctttcttttccgcgtgtcgggtgacgtagttttcctcttgtagcaacgtgaggacgactactccgtgtggctcgacggtacggtggtcaaaggctgttggggatgcagcgtcatggactggttgttgaggcggtatctggagatcgtgttccccgcaggcgaccacgtctatcctggacttaagacggaattgcatagtatgcgctcgacgctagaatccatctacaaagacatgcggcaatgcgtaagtgtctctgtggcggcgctgtccgcgcagaggtaacaacgtgttcatagcacggtgttttacttttgtcgggctcccagcctctgttaggttgcggagataagtccgtgattagtcggctgtctcaggaggcggaaaggaaatcggataacggcacgcggaaaggtctcagcgagttggacacgttgtttagccgtctcgaagagtatctgcactcgagaaagtagcgttgcgatttgcagtccgctccggtgtcgttcacccagttactttaataaacgtactgtttaaccacgttgcgtcgtgacgttgtttgtgggtgttgctaggcgggctggaaagatgatgtataaatagagtctgcgacggggttcggcgctctgccggctgcggcggcactcgctccacggcctccgacgagcgttgcgctcgcgctttgcgccgccgcgtcatggatctgcctactaccgtcgtgcgaaaatactggacttttacgaatcctaaccgcatcctgcatcagagcgtcaatcagactttcgacgtgcgccagttcgtctttgacaacgcccgtctggtcaactgcgtggacggcgatggcaaggtgctgcaccttaacaagggctggctctgcgctaccattatgcagcacggcgaggcttcggccggcgccaagacgcagcagggcttcatgtccattgacattacgggcgacggggaacttcaggagcacctctttgtacgcggcggtatcgtctttaacaaatccgtctcctcggtggtgggctccagcggacccaatgagagcgcgctgctcactatgatttccgagaacggtaatttgcaagtgacttacgtgcggcattacctgaaaaaccacggcgaatcctccagcggaggcggtggttgcggtgccgcgtctaccgcctccgccgtctgcgtgtcctcgctgggtggcagcggcgggactcgcgacggcccttctgcggaggaacagcaacggcgaaggcaggaacagcgtcacgaagaacggcgcaaaaaatcgtcctcgtctgccggtggtggtggaggcggcggcactggtggtggcggtggcggcggcgggagcggcggtcagcactcctcggactccgccaacggactgctgcgggatccccggttgatgaaccggcagaaggagcggcggccgcctccctcctccgagaacgacggtgagtcccggccctcctcgcgtcacggtgctttccgagtggactcgtgagccccccgtagcgcacgagcgagcaggcgagcggtgttggtgcgctggtggttgtgtggatgataaccatgtgctttttcgtgcgctatgtgtcgtcccgtctgtaggctctcctcccctccgggaggcgaagagacaaaagaccaccgcacagcacgaaggccatggcggcggcggcaagaacgagacggagcagcagtccggtggtgctggcggtggtggtggcggcggcagcggccgcatgtcgctgccgctggacacgtctgaagcggtggcctttctcaattactcgtcctcatcctccgcggtctcttcttcctccaacaaccaccaccaccatcatcaccaccataacgccgtgacggacgtggccgccggcaccgacggtgcgttacttctacccattgagcgcggagcggtggtttcgtcgccgtcgtcgacgtcgccgtcgtcacttctttcgctccctcgacccagcagcgcccacagcgcgggcgagacggtgcaggagtccgaggcggcggcgacggcggcggctgcggggttaatgatgatgaggaggatgaggagggctccggctgaggcggcggaggcaccaccgcagtcggaggaggagaatgattccaccactccagtctctaactgccgtgttcctccgaattcgcaggaatccgcggcgcctcagcctcctcgcagtccgcgttttgatgacattatacagtcattgaccaaaatgctcaatgattgtaaggagaaaagattgtgcgatctccccctggtttccagcagactcttgccagagacgtcgggcgggactgtcgtcgtcaaccacagcagcgtcgcgaggaccgccgcagctgtctccacagccggcgttggccccccagcagccgcatgtccgccactcgtcaccaccggtgttgtaccctcaggttccgtcgccggtgtcgcgcccgttgccgccgcagtcgaaacaccagctgctcctccccggcccgtgtgtgaaatcaagccctacgtggtaaaccccgttgtcgccaccgccgcggctgccagtaactcttcctcgtcttcttcggctccactgccgccgccgccaccaccgccgggcggacgtcggggtcgggcccggaacaatacccgaggaggcggcggtggtggcggtggtagaaacagccggcggcaggccgcatcgtcgtcgtcctcctcctctcggagatcgcgacggagaaacaaccgccacgaggacgaggacaacgatcctctgctccggttgtcgcaagtcgccggcagcggccgccggcgagggccctcgttcctcgaggacggactcgaaattatcgatcccagcgaggaggctgcgatcgccgccgcctcgatcgcggcgtttttcgacgattaaaaaaccgagccgagaccggaaaaattatgaaacaggacgcgcttggacatttgggtttccacccctttcggtgtgtgtctatatatattgtggtcactgattttttttttacaataaagagatagacatcacagttcaccatcttgtctccccggtgtgtctattatcatcaatcacccacagagtcgccagtccatggtctctcggtaatgcgtgtccagatacgcgttggccagtataaagtggtcgttgcccacgaaggcgcgggtggtgttgcgcggcgacgggtggcaggacttaagtaccaagtgccgccgtcggtcgatcaggtactcgcaggtgtgcgcgtcggcgccccacagcatgaacaccagatgctcccggcgctctgacagcctccggatcacatggttactcagcgtctgccagcctaagtgacggtgagatccaggctgtccgtgcaccacggtgaacacggtgttgagcagcagcacgccgcgtcgcgcccaggcgtccaggcaacccgaggccggacgctgaaacccgtccaccgtacgcgccagttcgcgaaacacgttgttgagggagggcggcggcggtcggcccgccagcgtgccgaaggccaggccgctggcgctgccgtcgcagtacgggtcctggcccacgatcaccacgcgcacctgctcgggcggacacagatagctccagcggtgtacgtgctcgggtgccgggtacaccatctcgagttgccgcgcgccttccaccgccgccaccgtgtcgcgcagcagcaccgtgtcgtggtcgggcaagctgaggaagcggatccagtcggcgctcagacaaaacacgcgagcctgctcgtcgggggttaacagagagcctttattatcagcaatgttagcgagcatccactgcttgagggccatagcgcgagtgagccggcaggttgacgcgcgtctgcttcagctcgggcggcagtccggcgtagtatttatctaggtggcgtagcagcggcgggtccagctggtgacgcaggcagaattccttcaccgcgttgtacaggccgtaaaagagcgtgatgccctcgggcgcggcagcggtgctcacgggcagacgcacggcgcggttggtacgcgtggcttcgttgcgtatggccaccaccacgttaaagagagacggtggcaccagctcgaagcctaacacgtgttccgtgaagatgctgcgcccgtatgacagtcgcgtgaggtcgtagccgcggcacaggtcgtccacgcacgtgtacacggccggcgagccatcgccgcactcgctgtagccgcgcattaccgtcatccagcgcggcgctgtgtccgagcttaacagcgtcagcagggcccgcaattgatccggattgttgtacagcagggccagagtgtccaggaaagcatcgtccaacagcacggagttggcggcctccggcgtaacgggacggtaacggataagttgcgatagcgggccatcgcgcccggtaacattcaccaacgggcgcagccaactttcatacttgtcaccctgaaacacctcacccaacaggcatcggcgcgttagttcggggcactccgcggggactttctcggcggcggtaggagcgacgctgacggcggctgaggaaacaatggacagcagaaggcaacaccacagcagtatcaccggtccaggtgagaaagagaagccgcaatccgggcggcggcacatcaagtctgcggcacgatgagagtgtgacggtaaggagccagttggcgccgaaagttggcactcaggtcttcgatccctaaaacgttatatattgcatccagcaggtgagccaggctaaacggattcacgtaccaggtttggttacccgcgacgatgacggccagaccgtgggcgctacagttggagaggttcctgggtacgaaggtaactgagtcgatgtcgcgccacggggggaatgagacagacgactggcgcacgctgtaatcacaactgtgattgacgtattgtagcgtgtaatttaggttgcactcagcctcgaagtagagggggaaccacagttcgtcgtactcgtcgtcgtcctccagttctggctcttcttcatccaccgcaatgtctacgctgctttgagattcctcttcgtacaggatgattgacaggttatggctacaaaggtcctgggcgggaggacgcgtgggagcgcgggtggtggtaatgttttccagatcaaaagttggagtgtagtcggatgttacatccccgttgttggaggtggtagaagttgcggccggtgtcgcggtggtaagtatggatacagaaggggagggggaagtagcgttcgtaccgatggttgtggtattattattccctgtgtttcttgttccagaaaccgttgacgttgagatgggaatcgacgtggtgctggacgtcagattgctgaccgaggaaaccgtggtgggagtggtgacggtgttactcgtggttgaagtgacgttaggggaggtagtagtggtaccggtggtggcgacggtagtgtttgtcgtggcggcggcagcggtggtaccggtaacggtggtcgcgttggtttccaccgcttcacacagtaagcaaaagcacagagccaggaaaagcaaccagccccgccatcgccgccgccgcttcatgaggtgggcaggcgaaagctggtgaattcgttgtacagcggcaagtggggcgccgcgatcgaagggtacgtcaacaagctgacgttgatattaaatacgtctggctgcttttctacgatggaagcgcacagggttacggcgtcaaacaggtctttcttggtggcgcccgagacccacatctggtatacacccgtctcgtggtacgaagtagagcgcggcaccaccggacggatgcagtccagaacgcggttgggatcttggtgaaagaatttgaacgtggctacggcctgtggcgtgtgcggcatcgtctgcgtgatgagctgctggcccgctaacacggtgacgttgtgcaacttgagcagggcactcttgagggcctggaaagcgttgccgcacgaggcgctgatctgcagctgcacggccgtggagtcgtgcagccgcatgagacgtgacacctcttcgaagacgtacttatacttactggcaaagagtggcgcgtatcgacagtcggccggcaaaatgtaggtggcgttgccgccgttggtagccacggcgggcgcagcggccgcggaggccggcgtaaacagcgtcagcggccggtggtggctggtaaggtcgatcatgggcggcgtggtgaccgtggcggtggcgggcatgacggggtttgcggcgacgggcactccggccacagcggcggccgcggcggccacggcggcgctggccgagcccacacccgccggcagtcctccgctacccatgacgccgccgggcagagcgtcgcccagacagacttccacagtggcgggcgcgctctcggcggtcagtacggtttgccgatcgacctcgcgacgaaagctggtgaggaactcactatgatccatggccgcagggcccgagatcccgggattctgcgggtgctgaccgagtgcgggccgagttatatggaagacgattagcttggagcggagttttgcgtccctagctgacctgcggatcagcgacgtaccatagggatagactgtgagcggcggccgcaacggcggggtcggccgccgttcgtcgtcacggggcggcgcgagggaggaggaggtggtgggtacgatcttgacgtggttgacgtcctgcccgtccgggggaatacgcaaaaaaacccgtcgcggcgctaccacgatggtgcgatgggtctttctcttgttggccggggccagggacttgcagatgcgtgtggagccgtagacgatctggacgtggtcctgggagaacatgaccatcgccgccaacgctcagcggggggacgtattgggaacacagaggatgagggaaaactccgtagaagtcagcgaaataaagacaacacagcagccactcctctcgtctcgggccctaccactgcttgaagtagggcaccgggtgtttcttttcctcaacgggctcctccagtctcttataggaccagtcccgccggcgcgccagcatgtaggtcacgtacaaaagaataatcaccatgaacaccaggaaagccagcacgccgtaggccagcagccggtcctcgaacagcgggtcgctcttgataaacacgtaggtggtggtaaaacttcggcccgcgatctgaacgtggagacgcacgacagtatacgtgccgttgaggtagaagacaaactcgcgtaaccgttgtccgttatacgtcacgttactaatattccacggcggaatgagctggttgccctgatgcagatgcacggtgctgttggggtgatagaggctgctaccgttgagcaagcagtgttcgtgttcctgaagcagcacgcggacccgcatcgtggtagcgttcaagcgagtcccgtacacggcgtagatgggataggtgaaaaggtcccaagtggcgttgtgatggcggccccagctgaagaaagagcacgtgtactcagtggtctcctgcggcctgagtcccgagataagcagctcttgagcagtagcgttgtaggagagatgtagttttcctgtggaaaaaattaatgagttgtttattttgttagcaggttggcgagggaggaaggagaacaaaacagaaaggtacgtgttacttacctttatcgttggagggaaaagcgctaagataccccacctgagtgaagggacccttgcagtctgtccgtgcataacaagtaactgataaaatgtctggatttttggtattattcaacaggattactttgcaggtggcgtttagagacacttggtcgtagctgtagctggcttcgcaattcacagtatacaggtgcccctctttctgcgtcgtggctatcacggaggtggaggcggacgaggtagaggtttgtaccgtggtggtgacagcagaagtgacgttgttagaggtacttattgacgtagtagacgtgacggtggtattactaggggaagtgacggcgcttgtggtgctacttttcactctcgggtgcatgtcgcccaagagcgcaactacgagcgcgatcgccagcacggaacacatgttgccgtgtgacgagacggcgtgtggacgagctatatgtggcaggaggtcgcgtcacctcttgtgacgcctaaacgtccagctccagataaaagaggcgttaataatgaagaccacaaaaaccacttgcgtcagtatgacaatcataaaggctcggtgattgctacgcctaaagtacgcgggattatccaccagttcatcctgctgaacaaagtggatgattgacgtgctggtgttaccggccgtcgtattgatcatggattttactaagaaagttttggcaccaaaagtcccgttagagccccagcaggtaacgctgccgttcacataggctcccggtgcccctgtcagcatgcgtttcagttcatgagtataatttttcctatcgttatacatatcatcactgtagttgactttgctggtgagaaactgtgtgttctgtggaatactgatcatcatccccgaggccaaaaagggcgaatcgcaagctgtagtgttacagaaaatagtcaggttagtgtcattatgctcatacatataagccacgctaacctggggctcataccacccaatcgcaaccgccagcacgtcccatctcccgacatttatcaccgccaccactaacaacgtcacccccgcacggtacatagttaccctctcgacgtcgccggctgtcaatgacgtgcctgcgtcagtggctatgatttatagcttttggacacaaccgcaacggatctgtcgtaatctaccttccacagggccgccgcgacgatgctgaacgacaggatcagacagacggcgtataggagtcctaggtcggcgtcgacgcggcaagtgcggatgtctcgcagggtgggtagatgggcgatgcacaactctttctccccccgcacgtacatcccatctcgtatcagcagccgtagcgtagcattaatggtcagcggggtaaccaaagaaatcacatagggatgtgtacaggaagtacagtgacgggtatccgtgagatgtaagtcatcacccttctcactgttatcatgaaagaccaggactcgggtaagacgacccgatgaatactggatctcccaccacagtctttggtccaacaccgagagggcacaagagattctaagtctccctgggttgggggagcagatgtaagccccgtgtgtgcccctcgccatcagaaccatacacatgagggggaaaaggacaagtatccgggaccacccgcacccccacatcacgagaccagagacggagatgtataaaaaaaagctacttttattaaacagcattctcaccacacgttaatactgtcacggggaatcactatgtacaagagtccatgtctctttccagtttttcacttactgagacttgttcctcaggtcctggatggctgcctcgatggctaggctcagggtgtccaggtcttcgggaggggtctcggtgggctgctcaaactgccccacgtcgtaggccttcgcggccgtctcgtagataggcagcatgaacccaccctggttggtggagaagatgcgcaccatgacctgtttgggaaacttttgcatcaggggcaggcacaggttgagagcgcccaacaggtccacgggggtggcagcgtggatgatcatgttgcggtaatcggaagaacgggggcataattggtgggtgtgcaattctttgaggctccacgcggccttgacgccttcgttacaagcatcggccgtgcgctgcgccacttcgggtgggtgtgtcacaggcatggtgtgctccatgagaaagggagtggagagggccaggttgcacatggtgcccaggcgacaccgcaccgcatccacctcactcttcacctcatgattgcgggtgtagatgatctggatgcccttgttgttcacctgcatggttttgcaagctttgatggcctcatctaacacctggtgcatactgggaatcatgaagggcaggttcttgtattcaagagagcgattggtgttgcggaacatgcggctcacctcgtcaatcttgacgcgaccccgccgagtctgcacgttgggtgtgcagaagggggtgttcttatctttcatgatattgcgcaccttctcgttgtccaactcggagatgcgtttgctcttcttcttgcggggtccggtgctcgccccgccgctgctctgatggccgcagctcagcagagaggaggaggccgcgccaccaaaaccgccgcgcccatggtggctcgaggtcacggatgctcctccgccactgctgcatttcatctcctcggactcactctccgagtccgaagccgaactgcaggaggaggaagacgaagaggaactatcttcatcgggccggcccaagggatcgggaagaggagggtggttcatctgggagagcgggtgcgtgggagaggtcactcgcggcgtgccgctgccggtggaaggggaagacgcggtagcaccgcgggtttcgacttcttcaccctgttcttcctcgctatcagagatcacgatacagccggcggtatcgataatcttgttgcggtactggatggtaaagtcgggctcgggcttgatgtcttcctgtttgatgaggaggggcagcatgataggcgcgggaggcacgggcggtttaataatcaccttgaaaggacgcgtggttttgcgcggtttcttacgcgggctgagctcgggagtagcggatgccccggggagaggagtgttagtaaccgcgacgctggtgggggtcggcttgttaagaggggcgctgctaacgctgcaagagtgggttgtcagcgtgtggccggtgctactggaatcgataccggcatgattgacagcctgggcgaggatgtcacctgatggtgataagaagacacgggagacttagtacggtttcacaggcgtaacacgtttattgagtaggattacagagtataacatagagtataatatagagtatacaatagtgacgtgggatccataacagtaactgatatatatacaatagtttactggtcagccttgcttctagtcaccatagggtgggtgctcttgcctccagaggtggtgggttcctcagcaccatcctcttcttcctctgaggcaacttcccctatctcagacactggctcagacttgacagacacagtgtcctcccgctcctcctgagcaccctccccctgttcctcatcactctgctcactttcttcctgatcactgttctcagccacaatcactgaggacagagggatagtggcgggtacaggggactctgggggtgacaccagagaatcagaggagctagcaccagcggtggccaaagtgtaggctgcaatagcatcttcctcatctgactcctcagcgatggcccgtaggtcatccacactaggagagcagactctcagaggatcggcccccagaatgtactgggcaaagaccttcatgcagatctcctcaatgcggcgcttcatgacattgataacctcaggcttggttatcagaggccgcttggccagcatcacactagtctcctctaagatatagcagcacagcacccgacaaaactcacttaagagagagatggacccgtacatggtcatcatgcaagcgtcactggtgaccttgtactcattacacatggtttccacacatgtagtgaggatatccataaatatgtgatcaatgtgcgtgagcaccttgtctctctcctcatccaaaatcttaaagattttctgggcataagctataatctcatcaggggagcactgaggcaagttctgcaatgccgccatggcctgactgcagccattggtggtcttagggaaggctgagttcttggtaaagaactctatattcctgtagcacatataaatcatttttctcttaagttcatccttcttagcacgggccttagccttcagtgcaccccctaacttgttagcggcgcccttggtcacatcatgcagctccttaatacaagccatccacatctcccgcttatcctcgggtacaatgtagttctcatacatgctctgcatagttagcccaatacacttcatctcctcgaaaggctcatgaaccttatctaagatatctaaggcattctgcaaacatccccccatcatattaaaggcgccagtgaatttctcttccgtctgggtatattttttcagcatgtgctccttgattctatgccgcaccatgtccactcgaaccttaatctgtttgactgtagaggaggataacaacacatataagtatccgtcctcctgactcatttatcgctatctcgatgccccgctcacatgcaagagttaatcttcactctatctgacatacacaagtaaatccacgtcccatgcaggttagtatatatcacatacatgtcaacagacttaccgagttctgccaggacatctttttcggggttctcgttgcaatcctcggtcacttgttcaaaggttttgagagattcttcggccaattctgggaacagcgggtctcccaggctcagctgactgttaacctccttccttaacatagtctgcaggaacgtcgtggccttggtcacgggtgtctcgggcctaaacacatgataaacaaagtcataagcacatgggtcacatacaggaaatatgtatataacattaaagatataactttttattaaaaaaaggggaacacaagtcccgacacgtaccgtggcaccttggaggaagggccctcgtcaggattatcagggtccatctttctcttggcagaggactccatcgtgtcaaggacggtgactgcagaaaagacccatggaaaggaacagtctgttagtctgtcagctattatgtctggtggcgcgcgcggcagcaacgagtactgctcagactacactgccctccaccgttaacagcaccgcaacaggagttacctctgactctcaacagaacacaactcagctgcctgcttcttctgctgctgctgccttaaatcttccatctgcgtcagcggtgcaagcccattccccgagctcattttcagacacataccctaccgccacggccttgtgcggcacactggtggtggtgggcatcgtgctgtgcctaagtctggcctccactgttaggagcaaggagctgccgagcgaccatgagccgctggaggcatgggagcagggctcggatgtagaagctccaccgctaccggagaagagcccatgtccggaacacgtacccgagattcgcgtggagatcccacgctatgtttaataaaaactgcgggcactggggacggtggtgttgtatatgtgaatttgtaaataataaatgagaccccatcctgtaaaaatacagagtccgtgtcagtctctgaaggacagagtattggcatatagccaataaagatagttgtggcaaagagccatgttatggattagtaatggaaagtatcgtcaccaataggggagtggtcaataatggtcaataacccacacctataggctaagctataccatcacctatagcataaggaagcgggggtgtatagaccccaagccaaaaacagtatagcatgcataagaagccaagggggtgggcctatagagtctataggcggtacttacgtcactcttggcacggggaatccgcgttccaatgcaccgttcccggccgcggaggctggatcggtcccggtgtcttctatggaggtcaaaacagcgtggatggcgtctccaggcgatctgacggttcactaaacgagctctgcttatatagacctcccatcgtacacgcctaccgcccatttgcgtcaatggggcggagttattacgacattttggaaagtcccgttgaatttggtgccaaaacaaactcccattgacgtcaatggggtggagacttggaaatccccgtgagtcaaaccgctatccacgcccattgatgtactgccaaaaccgcatcaccatggtaatagcgatgactaatacgtagatgtactgccaagtaggaaagtcccgtaaggtcatgtactgggcataatgccaggcgggccatttaccgtcattgacgtcaatagggggcgtacttggcatatgatacacttgatgtactgccaagtgggcagtttaccgtaaatactcctcccattgacgtcaatggaaagtccctattggcgttactatgggaacatacgtcattattgacgtcaatgggcgggggtcgttgggcggtcagccaggcgggccatttaccgtaagttatgtaacgcggaactccatatatgggctatgaactaatgaccccgtaattgattactattaataactagtcaataatcaatgtcaccatggcggtcatattggacatgagccaatataaatgtacatattatgatatggatacaacgtatgcaatggccattagccaatattgatttatgctatataaccaatgactaatatggctaatggccaatattgattcaatgtatatatcgatatggattggccatgtgccaacttgatgtcgcctctatcggcgatatggcctcatatcgtctgtcacctatatcgaaactgcgatatttgcgacacacagaatcgcccaggtcgccaaagtcgtctatcgccatcccccgtaaacgatataagcgctatcgccagatatcgcgtatgcccaaaaatcacttttggaaaaatggcgatatcagttacacagagactcacatcggcgacattttcaatatgccatattttcaaatatcgatttttccaatatcgccatctctatcggcgataaacaccactatcgcgcgacatgaatttagtcggcgacagaaatctcaaaacgcgtatttcggacaaacacacattttattatattatttcccgtgacgcaggctagttggcaaagagccgcacgctgaactcgaggctccgggcgtgcggcgccagcgaaccggcggcgttgaacgtggtccttttgttggtgccgccgcgacggttctgacgtctaaagtcgctgatgagcaacgacacctcggtcacgttgattctgcaagcacaggttccgaacgtcatttcacaccccatgcggttacctacccgttacccgttcgcccttaccttcccgttgtcatacacctttagcgcgtaccctcacctcttgagcacgtcaaagttgtccaagccgtggctcgcatcgtagtggtagttcaacgtgaggtccacgagctgttccacatacttgtaacgggtttggtcgggcagcgcgcgagagcacgcgtcccagtaatgcggtactcggtaataatcgtttttttctgcggtctcccgctggcactgacccagcaccacggcgcacagacaaacagacagccacacccgatacagccgcatgttgcagactgagaaagagagctttattatgagacatcatacacatagtataggcgaggtaatggggcggggaaagagttggaaccgaaagacaaaaaaaaaagcctagtcgtactcgggatctctgagcgagacggattgcgtagcaactttcattagtttgggaatctgccagctggtgctgttggaaggttcttccatttccgaggcggtcagttcatcgtacaccgagacgtagtacctgatggggtcctcctcattgtccgagaggtgagattcgatggtcaaaggcgagcctctcccataattgggattcacgaacgacgtgtccaagttgccatcctttctgaaatagatgacgttctcaggatcatgtttcatgcgctcgcgggccgcggacgcctcctcctcctcgtcccagtcccgagtttccaaccgctgataagggctcgaggaacaaaatccggcggggatctgagaacctcgtcgggaaccgctgccaaacgggctgctgccgccactatcgtccgtgtcgtccaacaggttgacggcctcttcgtcggcgaaacgaaagcggcccgggtgcttgcaacacgaggagtaaactaccgcgatgagtaccgctatgaagctgaaaatggaggtgcctgtcacaatgtagaagaggatagccagcactttcatgatttcgtcattgcgcgcgtcgtgaacggaagattcgcgggcggtggtcatgttggtttcggttgtaggttcgctactcgtagtgctctcgacggtatttctgctgctggtgctagtagggacgtttgtgctgctggtcatatttgtagcgtcgctgaagtccatgtgaagcagcaacccgaacgcgaccaggaccaggaatgttgcgcgaaggagaccccgcggggccggcattcttgagacgtggcgacgtggatttcttgttatgtccgcgaacgacgtgtgacgaggacgtggtttccgcaagcctctaccgacgccgcgacaccaggtaggttatgaaaacgcgagcccatatcgccgccatcattgtaatcagcaatgtgttgaggtactgcacgatgaatctgtctagtgacaccagccaaccctctgcttttgcgggcaagcgcgctttcggtgacagggtgtatcgtacgtagccgcgggtcaggcgcgcgttgtagcggtacacgcagaaatctatccacaggccaacgcccggctgtagcttcggatggtggataatagcgcggtgacgtacgccgcggggctttagaatctccacctgtaaggccatctcctccaggtagtgggtctgactgcgacgcagcgtccagttcatgtaaaagtcggtctcgccgtgtccggccacgaagaggctgcttactaaatcgggcgccagagctaggtcaggcgtatcaaattccactgccaggcgacctgattctaacggttccacgatccgggagagcgtttctagatatagagcaaagcgtaccacgtctacctgcggtgtaaaaaactgttgtgggcgttcaccgtcgttgaccacgtaggccacgtagaggccaacattttccaccacgggttctagctgcaggcggcacgtaaagcttagaaacgacggctgtacggtttggttcccgtgaagctgaagcgtcacttccttgccggggctcaccgtgctgtaacgtcgcaccgagtcggtcatctgctccagatcggtagaccagaaaggcgtgcaatgcatactgtcccagtcgcgacacacagcccagcctagctcggtgaagggtcgacgcacacccgaaaaagtgtgcttgaagaccagggggtcgcctcggtagctcagtagccgaacatgcacatagtcgcggctagcgttgacagacggcccgtggagggccagtaggacgagcgtgaacagcaagcgcaacatgctgcgcgggttaggaaatgcggcgtgccggccaccgcccgactcataaacgctaccagcatgacgtctcagatcacacaagtgacgaggagcgtaccgcaaatcactagggaaaaggccagcagagcccgatagtcttgctcttcgcgaacgatctcgtccggttcctcgcagtcttcgtggtccacagaagatgaggagcaggattcttcgttaatctctgccaggatactagtgctataccacaccagagcgctcagcgtgcccagggctaccgcacggtaaaatagggacatgatcaccagcgcagtctaaagtagtggtaattaagtttcttggcgtatttccagagaaaggctttgtaggccgtagggactggccaggcaccgaactcaatattggtagacactacgtcgtaaatgcgttgttcctcatctaagattaaccgaaaaaatagccggttgatgtgacggcgcacggcttgcgcgttaggattgagacacttggtgcccttgtcctttaaaatagccagcacttcctgacgattgcagctttcgctcgctgcgattggcttaagcagttgagttccgactggcagggtattcaacagaatttggttgttgcaacggcagcgcctgtcgtaatcttctagttctaaaacatggacggctaggggacatatggtaagtaacatatatgcgattaatgacaggtatcgtaccgataacagattgatatgcgagtttgaaaccggatggtgcaaccatgttagtaccatattaaacacatactgtaatattttgttttaacgaacttgtctgtttgaaaacatacattaaatattatcctctaacacctatcaaggttatatttattcgtctcggttctggtgatttcgttatgttaacattataccacctattatcgttgcgtttgtctaaccattttgagaagaggtgatcgggcgataaacatactccatgtccaggcggcttccttccgtctggatacaataaatgttcatttttatcgcatccgggccctctgggatcgcgatgaagccaataattacccaatataattttattaggcggccattttctatgaagacatctgcagcgtaattctgttccattcacctcataatgatacacatatgctaaaaaaataatcaacgcaccaaaaattaatcgcattataattttattatctacgtcactaccagtaattcgtaatatccggtattcccggaaaatcactcaaaactgcgtccatgacacatcaattcccgataagtacccccctttgaaatcggatccccccacataccaatcaatcacacaacacacaggtttaaaaatcgatcacacgtcaattaggtttcaaaatcgatactgtttattatcaggaatctagactaattctacaatgacagctctgaatttctctcttgtctttcttgtcaggttctcatcatcagtcatcacttccacccatcgaggagtcatcgtcgctccaaaatcctttggggtcgctagttggaaaagtctctgacacgatccaggcaccccgcacccagtccgactgatctagcttgcggagcatctcaacaggcatgagctgcagggccacggctgtcacggcactgtatcgatgtaacactagggactttctttgcgatgtagccatcaacacggcgtatgccccatagttcgcgtgatacgacgcatgatgggttaaacgttcccatccggcagtgccgtctcgggtccgtgcacacaacagctgcacagcgttatgatgcttaaaattaaccataacgctgggactactgatgaaggagtagtaatgagccaggacgccgtacatcgaaggcaacaagaaagagtgacagcacgatagcaccgggctcttatgtaggcgacagcttatttttcctgacgtcggcaaaaagtacctaaattccccacagatattcagacacggttccgtaaagtgcttctttttttagtgcaggaattggaaaaaataataaaaaatatgaacagctcatctgtaattatctgtgtgacttcatcgtaccgtgatgtaaaaacaacaacaggaagcttacagggtgcggtagaaaaatttgccgattgtgcaacactgttggcatctctcactccgataggcggctataagatagagaattaaaagtatgatacccacaagaaagatgaagagggacaaccaggctagagtatgacgaccgcttttcctttgtttgacggttacatgtgcggtatgattttgctgtcgttgcttgtgatgttggacacctggagtggaaaacgacgtatgattcttagatgcgcatatggtgttattagtggaagtgcagttacgaaccgtgatctgagtgtcgttacattgagtacaattagtacagttgtaaagccctgtgagataagtaccgtttgggcacagtgtacacgttatgccactattctctgtacacacttttgtaactttttgtcctgatccgcatggcgggcaacattgattacccagcttcacctcatcgggcttacacattttacttcccccaagctgtagtaaaaacataccgaagcagatgagcatcaccagaggcttcatgcctcctaccggaagaataaaaataactcatagggccgaacggtgtcatcctctccgcggtttgtaatacgagattgcaaacgtaaataaatgacataacttcactaacacgcatactacaaagtccacctacgacgctgaaagttcttccaggacagaacaggatagtcagccatcttcacagtctacctcttaggccgtatccaggagcataggtaatcagtttccagccacagtacagcgagcccaggaaaccgcacacggtccctgccgggaacacgtaccaccacatcgattcgtcgtgccgtagaaccgtagagttttccgaacttttatacacgccggtggcgttagggccgtgtgtgctgctgtgattggaggttttgtgagctaggtaacagctgtgatttcacctgtcgccaacactgacagcgattacccaggtggagcacaatcacatagctgatggacgttggttgatccgttgattcccatggacattttaacggcgacagtacagctcccgttaaacattagaataatagacgttagtggataacagcatgttattcgcccaagtgtgatcgtggttatacactttcttgttttttgctcatatgctgtaaggtgttcgaggatcgtggggagtatatgtgttgaatcggaatcatgtttactgaccgcgccatacttcgtatacgaacctaaccggcgtaaagtgttttccgatatataaactggcgcctattgtggctgtagcgcccataggtatggcgtatacccacggtgatgttgtgttattcgttttttgtgataaaacgtagcttatgtttaacgtgtgttccgtcacgttatgtgtgtcgttaaaagacggcgcctgtacagtatggctttgagttgtatcttgaattgttattgcatctggaggtgttgtgtacagagtggttgttgcgtgttgaggtgttgttacgttttgaggcacagttgcggtgtacacgggctccaaggtgtagttacggagtctttctatgcaggtagtgttgagatatttttgaatgctggttatgttcgattctgtgaggttaaagtgtgtactatttatgacggtgtaatttagacggtcttgccatcccgaggatattagtgttaggtaattcgtgttgttcacgtttgcttgatatgtataggtaggtgtactgtttgtgaggtcgcaagtgtgattttcttgcagagattttatccatcttgtgtgaaaatattgagatacgcgatgaatgttttcgctatctatattataaagcgtttcagtgtcacctaggggttgtttgttgtaacttttattttggaccctgggtgtgaaccatgattccaatgtttgtatagtaaggtgtcctactaataaagacgaactgattcctaccgtaatgttataccgcacacccagggtgccgtttacaaacacggaaatgtttccgttacaaaccacgttggcagatgaattagattccaggtggtaacgataggataatgaccgttcgctcccaacggatgacacaaagtatccgaataaccaacacgcccattcaatccgcatattttaatcacactattcacacctcacacactgcattttttaacatcttatttttttattttatgcgtgttctcacctcttcatctttttaacaccggggtaactatcgtaagtcggtaggcgtcgatagccctcaccacctcgtcgtccccttcccggcgtggggcaccagcgtccacagcactgcaggtaacacaggtagcataggaaacatacggtgaaaatactccaaaatcccaaaaatgccgcgattccccgagtggcccagggagacatcccggtgtctatgtcggccggcggtgctggcgtcaccggtaaaaatttcggcgggtgtggctgcgaacggtagcagtcgccggggagccggtaacgctgtatcactgtccaacagcggtcgggttcctcgtccggacatgcgggtttccagcaatcctcggcgtcggcgcgtccgatatagaagtagttgcgctgaaaaccgcggtacatcccgcagtcgtgattccgtagacgccagggcgtcggcgaccagatctggtctcccagcgagtagcgacctaacgccggcgtgcagcaaggttcgtcgggccggctgagcgtctccagttgcgtgagaattacgaagcgttgcatgatgaggccgtggctgtagttgcgcagcacgcattcgtacatgccggccgtgtccgtcgatacgttgaaagtcagcgagaatatttggccgagatgcaattgcgagaaattccaagtggcgtacggcaggcggtactggagtccgttcatcagccgatggcctttgacggcgtccaggatgagctcgtcgctgccgtcgtgggaacgacagaaacgtgcgcgaatggagaccatgggccaggagtgtgtcatgaccgtgcaggggatggtaacttgctctccctcggcgaccaacaccggcgccggcgacgtggtctcataattctcggcccacatcttttcggcaatgtcagcggtggcgaaggggaacgaagaggaagaatattcgaggagtcgcgggcagctcaacagcacccagaacagccacggcagagttcggagcgactcccggcggcacatgatgattctttccttccctttttcgcagagacgctgcgcgcctgctcctgctccgtgtgtcggccgctcaaacgtcgggccggcgtggtggtgaccaccgtgcgacgcagcttctcgcccgggatgcccgcgactgagcgtccggtttttttgcaggtcttttttgctgcctcctcctcgccgtcgccgtcgcggccgacgtggtggaccagcaccgcgcaggaactctcgcgtcgccggcggtacgcgacctgtctcattgctacctcggatgtttaagaaggaacgttcatctgcgtcacagggtctgatgaagctgccaagagtcgtggctgtggcgcagcgcgttctgtacggcgcgtttcaccgctttctgcatggccgctaccacgtcgggcgggagcggctccggcggaagctcgatgagcagttgctgcgagtctcggcgctcggcgtccgccgtttcgtcggacgtggcgtagaaaaccgaggtggtcgcccagtcgtccacgctgtcgacggcctctgtcagtgccgggttgtcaaaaccgccatcggacgcgggtgataaaagaacgtacgatgacacgctgttagtacgattctcgtcgtcgctctgggaacgacgtgatggacgacggtagatgacctcgtcttgccacgcgtcgaagcgatcgcagcagcgctggatccaagcgcagcgaagcagcttacggaacacgtcgttgttccaaaagtagagcataaagagaaagaaaagtagcgtaacgatgaagccgaaaacgacgagggtcggcagggcactaccgccgctgccgttttttgtgtcgtgcgggtgcacggtggtagtggcgttagtctgagctggggtcatgacaagtctgaagagatgagagcgtgggtgctcatcagggacagttgaggtctctccctaccgaagccttagcctctacggtgttttatgatcaacgtgtctacgaacgtcattgtgaaagtgacgtctcaggctttccgaaaccgcgtcagattcaacgtgggtttcggtttagcctgcgtcaccgaggcggaggtggaaatgagccgtcctgtgggggagtgtacgaccctgtagtgcccatgggtaacgtcgcgtcggaagaagtgaatgcggcattggtgtacgcgtgggttgttttgctctctgactcggaggagttgccgcagcagctgcagattttacgtactagccaaaagcagcaaaagcagcaggtaaataagagaaggagtccagataatgtccagccgctagcggcaaacagcgcaagttgcgcgactgtccaattactaccaccaaaactctcaacacattgaatcgacgctgaggttggtgttgcagtgctgttgctactagtggatgaagacgaagtagattgactggaattagagctggtacctgtagtggtttcacttgccgatgcggcaagtgcaaataaaactaatatccacagcatgttcgttactatataattgatatacgaacccgtttgtcgtaacaatcagcgttatatacgctgtatcggcatcgttttaccggaaagtttatcgtaatgtaacccgcgttgtgtacattcgtactgaaagggaacccccggtgatgtgcacattatactctttcattctggggtttcccaatgacgtaaaaatttccactatacaataaaattacggaatcatgtgaaaagtgtgctttttattaacagagcagagggtttacagtagatatatgtttgccagggccactgttttctaacaccgatcaccgccaccattaccacccgttgaactccacacccgggagccgcctgatcgccagggactcctcaccgtccatcgtccgaacaagctcccgccaccgatgctgccaccatcaccgagagaaagaaccgcttgctgcagatacgcttgggctcgcctccgtgcggacgccgtttcgtgcagacgctgagtagatcgagcagagaatgtcaaaacgacattaccgcgatccgctcccctcttttttctttttctcattcacgtgtattcttgatgataatgtaccatggctacggtggtgaactgcgtcgcggatcccgtcacgggtttcaacagatcgacgtcggtcagcggcgccgtcaccgccatgtccggcggaggcacgctgtttctctggttagcgacgtggaccgacgacgaagacgatgaacccgcgcggcggtctgttatccgcgacgacgcgtagctgcactgggaagacacttcctcccaacggaccaagatctcatcgggccgttcggagaaacggtatcgtctgtccgactcccgccgtacggcgccgaggcccagcgacgacaggtccgcgaaccggcgctcgtattccccgtacagctcgcaacagcggatcagccagcggtagctcaaaaacatgcgcaccagtttgaaggtgtcgtgccaatggtaagctagatagcagagaatggccacgatcagcacgagcatcacgccgatgatgggtaacccgacgttcagcggcagatcgtccatggtgaccgtcctctgtccggatctacgtcccagtctctctcttttgtacagcactcgcgcgggaacggccccctcaaccctcttacgtagcgggagatacggcgttctcccgcgggccacttacttgcacggtcgcttgaacggcggcttggactgccacatgcaccgcatccatccatttcggcagcagcgcgttcgacgatgtcgtacgagtcgcggatgatgttaccccgccagcacctccgccggcaaccgcgtcgtcgttgctatcgtcgccggtttcgggcgatgacagcgccggcggcgcgggtctcgtctcgtccaccatttccaccgtgtcgaagcgacagccgctgccgtagtacatagctccgttcaacggccggcgggccgggtcgccgagttccgggtcgggcacatccatggctcgccgtctccttctttgccgctcgtggtgccgacggcacttctcgggataatgacagccgcaaaatagatcgtggagcatgtctcgccaactgtcctggtgataatatcttaagtacgcgatgagcgcgccgatggccataatcataagcgtaagcaaaacggcacagataacgtgaaacaccgcggtcatccaagtcgggcggcgtcggggacgcggtgggtcggtttctcttacgccggcgtcactcagccaccacacccgtagccgacattcccagaatcggtgaatgcgactcaaggcctttcgacgccgccatttatttccaacgtccaagtcccacgtcatttctggcatctccacgcccttgactgacatactctctttctctctcttagctgcggtgaaaaagagggaaggcgtgtgctgctatacaactgtacaacggacgcgctcgctctttcggtctcaggtcatctgcatcgactcggcgtccttcatgacgctctgcaccgccttttccaacagttcctcgatgtccgaccatcgaggaggcggggctaactcggaaaccgacacgataggcagcgtggtcggctccgttggtgtgcggggtcggggacagggacacgagagtcccaccttcgagagattctccagcccgacggtgcgcggcagtctcggattccgcggcggcttttgcggcgtcggcgttttcgggaagggcctgggcgtcaccggcggtgtccagccgaccggcttgggtttcgtgggcggcggtgttttcttggtgagcggcgtgctcaggttcttacgcggcgcgggtatcggcgtcgggggcctgtgcgacgacagccgcgtggtgggggcccggaccggcggcgtaggcggccgcttcttgcgcccgggcggcggaggtggcttccaggatggtggcggctgatgcagcaccgtgtcgacgctggtcgaggacgacaaagagctcgacgaggaacaatgcgacggagatcggccgatgctggttggcgttcccggagtggatacgtcggggatctcgaaccgcgccggaggaaactcgggtttatctatcggcagaccatcctctcctatgtagagcgacgtacaccgcggcacctgcggcgtcggcgggtgggtggccacccgcatgagccccagttccagatccagcggctcgacgacgtcttctttcggattgcgatagcagcacgcgcaggcaccacgcttatcagaagcagcacccgggagccggcctcgcgacgaagtctcgtcggatcgcttgcggcctcggcgctgggtaaataaggaaatggccaggaccagggaagccagtccggtaccgccgaggagcccgacgccgagccacagccacaccatgatcttctctcctgcttggaatctcaaactccgtgtcgggaagggccggtgtacggacatttatgccttggatttctggaaacgtcattttttggcaaggaatgtgtttattgtccaaacactgaggaaggagatgtgggccaagtcggaaaattccttatcacaccgggggcgggttacgttccggtctgatgctgctgctgttgttgtagagccgcggccacggccgtctgcacggcagcttgtaccgcctcggccacgccgggtggcatctgcggcatggcggggggaggcgcgtcgggcggaccgccgggcatcgccgtcggctgtgacggtggttgtgaactcaccgtcggctcgcacggaggtttgttcttcggtctacccctcggtttgtctttcgccctacctttcttcggtttgggttccgatgtcggtgttggcggctgcggtgggatgacgggctggtgggactcctccgacggcggggggacgaacaccgtcggcgccgaaaccgggggactctcgactatctcgcagatcaccctgtcaggatcgtcgccgtgcccgggacgccgtcgatgaccgtattggaccatgtcgtaaatcatcgtctccttgtaacacgctgaacagcagcggctgcaggggcccgagatgcatttacagctgcacttacagctgcagctgcagtagcgcacccatcggcaagttaaaatgtcgattatggaatctttgaaaaattcccggtagcggatgaggtacgcgcagaggaaaatcatgaaaacggaacagacgaccacagccgcgatgccaggtccagaaaaaatattcgctgatgaacccgccaaacaccaaattcccaaggccgcgcatatcatccagatcacaatgatcgcggggacgccccattggcattggcacgaaggatcttgcacatcgcaacccatcgctactgcgttctcccacaaacgccatcgcactatttatccctacagcggctgccgagtcacgtccgccggcgcccatcggccgcggcgatctcctagtaacactcgtccgacacttccaccatctccagctcggccggcggttcggcatcctccaccagcggcgtcgtctcatctttgccgcagcagcggacgcacaccttctccaggcagaacgccaccagctgccgccgaacgtaccacaggtacacgtgcagacctgcgaacaggactacggaggtcatgaccaccacgacgcacacgggaatccaaggatcgagattgtcgctggaactcatggctatcgccaccgacgtgcccgcgtctgtctcaccgccgctcgcccgatgtcgcacggcttgttatacgctagcccgtcgccgcctcggggcacggtgccctcctacccacgtaacttcctccgtgacttaaagtcgcgtgtggtagatctcctgctccgtggacgaaccgttcggcaggatagcggttaaggattcggtgctaaggccgtgtcgccaacgtcgaatgctacgttgcaatagcttcgacggacggccatcctccctctcatcgcaataataaaacaccagcagcgcacacgacgcgatcacggtgacccccatgactagacccacgcagatagccagccccgctagcgtatccagcgccatcccgttcgctcccgtcgtcgtctcctgaacaaagcaactccgcagtccccgttttcaaccgttttcaaccgtttttgtttccttctccgcgactagatgttaacgcccgcggtctttccggccgtgctctacctcctggcgcttgtcgtctgggttgagatgttctgcctcgtcgccgtagccgtcgtcgagcgcgagatcgcctgggcgctgctgctgcggatgctggtcgttggcttgatggtggaagtcggcgccgccgccgcttggaccttcgtgcgttgcctcgcctaccagcgctcctttcccgtgcttacagccttcccctgaaacccgcgtcaatcgactgtcccgaaaacgccggcgttaacacaggaaaaaaaaaccacgcaggaaccgcgtaggaaccacgcggaacatgggacactatctggaaatcctgttgaacgtcatcgtcttcactctgctgctcggcgtcatggtcagcatcgccgcctggtacttcacgtgaaccaccgtcgtcccggtttaaaaaccatcatcgacggccgttataaagccacccggacacgtgccgcggcacttgcctacggcgctgctccagggaaactcctcttccttctgctcttcctccttcaccgcagggaccgtctccctcgaccagggacccgccgaagcaaccgccggaacaacctggaggaggcgcggcatgacggcacccaagtgtgttacgaccactacttatctggtcaagaccaaggaacagccctggtggcccgacaacgccatcaggagatggtggatcagcgttgccatcgtcatcttcatcggagtctgtctggtggccctgatgtactttacgcagcagcaggcacgcaacgggagcggcagcggctagataagtctctggcggctacagctccaagcgccgtagccggcccgcctgccgatcgcgacgtcgtggaccatcgaacagagactcacgcgtacgagaccccgaggtacgccacgcggtgcctaacgcggtataccacacccgtacggtctgcagtgcggcgtacaacgtgtggaaaacgcgttgcgtcgcagagtcagccacgtccccgtcttgtcgctccccaatcggctcccgcacaccccccgcggcacccagagggcgggtgagccaagtattcttaaggccgttctctgttccatatcccataaattgtttattccggagctcgttggcgcggaaatagccggataaggggagcaacaaccgtcggcgaaagccgtcccgctcattcagtccgggtttcgcgtctagtcggaggtgtgaccgttggccaacggaacggcgtttcacgatcaaaatcgtatcgggtagtgtaggagacgtcggcggtgcagaatgcgactcgcggcgtagctcgccgtcgctatgcggctcgtcgccgtgtggcgcggcctggccggctgtctgcgcccagatctgttggccttttgggtcctctggctgctgctgcgtgtgtgctttggcagacgcggtggcaatttgcggtctgcggtaagtgaggatatcgccgagcaagcgcatttgcggcacgtgggcggcacgcgtgttattgttcgttcgttgccagatagcaagtgctgtcgacagcagacgttgtgggcggttggtgtatttttgcgggttgcggtgaaagtcggcagccggcgtcttgtgaagtatcttaaccatctgtgttgctttttgcagcgtccagaaaagcgacgcgactttggggatggcctcgtgctcaccttcgcggagagcgccgccggacctgctcgtcagcagcgagctacgcagacggaatatctggaggagagttacgtgtgtcacaggggagcgcgggtctccggcggtaacgacggcggtatcgtcgacacgtgtgcggcctgctgtgctctgcggaaaagcgccggtctcggagaccgtggacgaaaaagagaacgcagcagctaccgctggcggcggcgtcgttaatgctgccgttgatgatcgacgttgtgagtactcggaaacagcggtgaggcagaagctcggttctccagggaacgaccgtcgatgcgtggtaggcgcagcaggtgaggttggggcggacaacgtgttgcggatcgtggcgagaacgtcgtcctccccttcttcaccgccccacccaccctcggttggtgtttctttttccttgtgttctgcagatagttccacggacagcgacggcaagtccataagcaccggtgtgcaagtggtggagcacgacgaagatatcaccgcgccgcagagtttgtggtgcacggcgttcaaggaagccctgtgggatgtggccctgctggaagtgccgcgttgggtgtggcagggctggaagaggtggcgcaacagcgagtccgggcgtcgatggagtgctgggtctgcgtcggcttccagcttgtctgacttggcgggcgaggccgtgggagaattggtgggctcgctcgtcgcgtacgtcatcctcgaacggctgtggttggcggcccgaggctgggtgtgcgaaacgggtgtgcaagccgaggaggccatggcgcgacggcgacagcgcatgctgtggcggatgttctctcgtggaggcgacggcgaatgcagcacacggtgtgcgatggagatggcgtgcgaggaagaaagcgccgtgttgtgagccgacggcgcgggacgcgggccggcgcagcgcgtgggccacgtgtggtggcaggcggcgtcgtccgcttgcggccgtcgccgcgccgcacagacgcaaacacatgtcgccgtcaagagaaacagtctgagcatagccgtctgcagcggtccgcgtgtagaagcggggggagaacgacgttaataaagaatagcggcggtgccgatagggcgaccgctgaagcgagctgcgtgtgcgtgcctgttttgttccccgtcgccgccgaaaagctacgcgcggcccccgtccctagccttgagcgcgccacagcacgccgcaaactcggcgtcgcgcttacgtcccgcaaacccccctcagcctcgtcccgccaaccaataccgtggcacgcagtgccatagcgccgcgcgtcaaggcgcttacacccccctcagcccggtcccgcaccggcgtcggtctgggtgtggcgggggtgcggctgggtgggtgtgtgccgggtgcggctgggtgtggcgggtgtgtcgcgggtgtgtcggctggctgtgtggcgggcgcgtgccgggtgtgtcgcgggcgtgtgccgggtgtgtcgcgggtgtgtcaggggtgtgtcggcggggtgtgcgcgcggccagatggaagcagtgtgccccggggcccgcgatccccccccccgccccggcgcgggcgcttcttctgcgtgtgtcctcgacgcgggtctgtgcgcctgcctgccggtcccggcagactgggctgcggcttcctcgttttttttttccgcctgtggccgtccccggggacttcctcttttccgcgtccgatcttcgcgtccccagggagtcgcgccgccgtcccctcgggaccgcttcctcttttccccggggactcaaagacacgcaagacagacgcgcgactgaaagagacgcaagacacacgcgcgtctgggtttcgccgtgcgcgccgcacggcgcttttattcgccgtcgccgtcccccgccaccgccaacttcccaaattcccacatttcacccccccgatgaaaacacccccccgcccctcggggacccagcacacggcccggaatggaggtcaggcgtccacctaggtgtgcgcgcgctcggcggcccgttgttggtggcttgtcgcgcatcttctttcggttttttcacggccttccagactgcgcggcggcaaggcggcgccagcaagcgccgtgcacgtcgctgcctataaaagccaggtgcgtgtcgcccgcggcacacgggcgacggaggcgtccgcgtgtgtaaacggcgtggtcgctgacgcgggtttgcttcctatatatacagagtggacgtcggaggcgtccggcggccatggcccagcgcaacggcatgtcgccgcgccccccgcccctcggtcgcggccgcggagccggagggccttcgggggttggttcctctcgttcttcttctttggaagcgacgtcaacagcggggactagtacgagtactgcgggtacggcgacgccggcccacgccgtccaccgggtagaaccccgcgggccgccgggcgcccctccgggtagcggcaacaacagcaccttttggcacggcccggagcgcttgctgctgtctcagattccggtggagcgccaggcgctgacggagctggaataccaggccatgggcgccgtgtggcgcgccgcgtttttggccaacagcacgggccgcgccatgcgcaagtggtcgcagcgcgacgcgggcacgctgctgccgctcggacggccgtacggattctacgcgcgagtgacgccgcgcagccagatgaacggcgtgggcgccacggacctgcgtcagctgtcgccgcgggacgcgtggatcgtgctggtggcgaccgtggtgcacgaggtggaccccgcggccgacccgacggtgggcgacaaggccggccatcccgagggtctgtgcgcgcaggacggactgtacctggcgctgggcgccgggttccgcgtgttcgtgtacgacctggcgaacaacacgctgatcctggcggcgcgcgacgcggacgagtggtttcggcacggcgcgggcgaggtggtgcgcctgtaccgctgcaaccggctgggcgtgggcaccccgcgcgcgacgctgctgcctcagccggcgcttcgccagacgttgctgcgcgccgaggaggcgacggcgctcggacgggagctgcgccggcggtgggccggcacgacggtggcgctgcagacgccgggcaggcgactgcagccgatggtgctgctgggcgcgtggcaggagctggcgcagtacgagccgttcgcgtcggcgccgcaccccgcgtcgctgctgacggccgtgcgtcggcacctgaaccagcgtctgtgctgcggctggctggcgctgggcgcggtgctgccgtcgcggtggctgcgctgcgcggcagggccggcgacagggacgacggcggggacgacgacgacgatgacggcggggacgacggcgatggcgacggggacgacgttgctgccgggggcgagcggcacggagacggaggccgccggcggggacgcgccgtgcgcgatggcgggagccgtggggtctgctgtgactttacctccgcagccgtacggcgccgccggcgggagcgcgatttgcgtgccaaacgcggacgcgcacgcggtggtcggaacggatgcggcagcggcagcagcggcggcgccgacggtgatggtgggtccgacggcgatggcgggtccggcggcgtcggggaccgtgccgcgcgccatgctggtggtggtgctggacgagctgggcgccgtgttcgggtactgcccgctggacgggcacgtgtacccgctggcggcggagctgtcgcactttctgcgcgcgggcgtgttgggcgcgctggcgctggggcgcgagtcggcgcccgccgccgaggccgcgcggcggctgctgcccgagctggaccgcgagcagtgggagcggccgcgctgggacgcgctgcacctgcacccgcgcgccgcgctgtgggcgcgcgagccgcacgggcagtgggagttcatgtttcgcgaacaacgcggtgaccccataaatgatcccgtcgcatttcgtctttcggacgctcgaactctcggtctcgacctcaccaccgtcatgacagagcgtcaaagtcaattgcccgaaaagtatatcggtttctatcagattaggaaacctccttggctcatggaacaacctccacccccatctcgccaaaccaaaccggacgctgcaactctgcccccaccgctcagtgctcaggcaagcgtcagccacgcactccgatacgatgacgagttgtggcgcccgctcagtacagttcacgaccacaaagcctggttggatctcgacgaatcacactgggtcctcggagacagccgacccgacgatataaggcaacgcagactgctgaaggccactcaacgacgaggcgccgaaatcgacagacccatgcctgtcgtgcccgaagaatgttacgaccaacggttcactaccgaaggccaccaggtcatcccgttgtgcgcgtccgaacccgaggatgacgacgaagatcctacctacgacgaattgccgtcgcgcccaccccagaaacataagccgccagacaaacctccgcgcttatgcaaaactggccccggcccacctccgctgccgccaaagcaacggcacggttccaccgacggaaaagtttctgcgccccgacagtcggagcatcataaaagacagacccgaccgccaaggccgccaccgcccaaattcggggatagaaccgcggcccatctctcgcaaaatatgcgagacatgtacctcgatatgtgtacatcttcggcccacaggccacggccgccagcacctccgcggccgaaaaaatgtcaaacacacgcccctcaccacgttcatcattgaaagtctctccagtccatatgttgtcaggacgtgctgtcgttctccgcttgctgcgaagcccgttcttccgagtcgtgtcgctgcgtccagcgtcgcgcccaagatgggaatttgggtctcttcacgcgtagcctcctccaccacggctgctgatcgccgtcactaaggaccgacacggaggatgacgaggagcttctccccgactccgcggtccgcgaccggctacgtagcgcgtgtccctgccagtctccgcagttacaccacacgtcgtgagcagcgtgcacctgctgccgccactgggcctcggcgtgctcgggccacccgccggagcccggtctgagctccgacgcaggatgcgcgtactcaacgtgcgccttccagtccatacagcaacaccataggtcgtgcgagtcgtcggctacccgccgccaggccagttcccgcatgggaaggctggacacgccgaccgagaggtcaccgagcccggacgccatctcttcttcctctccgtcgctgtcattaagcagccaggtcacctcctccgctccgcggtccgccggtctcgacggaccgcgccgccgtcggcaacacggaaaacagtacgccagcccgagccgctaaggccgcatgcccctgccgcccaactgaacacgcatatcccgctcaactgcgttttgccacccctgccagtgctcccgctcgagcaccaccccgcatctcccaacctttttccaataaacgaaaccgacatgacacacgtaatgggtactcgtggctagatttattgaaataaaccgcgatcccgggcgtctcagcacacgaaaaaccgcatccacatcatagacaagttacagtccacagtcacatacacgataaacaataccaacagggtaatgtttatggagtaaaacactattgtccaggccacatgcgtgtatgacttccgcaccatcccgtactgcatgttccacatgtacgcgctagacgtgtaatccactcgcagttcggggacgcaacgcagccagatcacatccccttgcagtaccagacgcagggctagcgtctcgaagatcggcatcacatctaagttccgcacgttccactttaacgactccccgggaacgaactccacgtcgtcggcgtgtacgtacaggttctctcccacgccgccataatcggccttcggatcgaagacgaaccgactcatgttgcccacgatgctcccccgagcaaacaacttgccgttgtcaatgtagcaccggttgtcctcgatttgaaaccagggatgcttggccgtggacttccagggccggagcgcgtcttccccggctttagtgattccatcgggcaggcggatcaagggacccatggaggtccaaagacccacccaggctttccagagattgttcatggtgaaacagcgtgtggactgtacgctctttcccaatttatatcccagagtagtgacgtgagcccagccacctcccagattcctgacgttttggttgtctttcctgccaattcctcccgtaaacttatgattatcctagcccattcccgataaaaatacacggagacagtagatagagttacgaataaaccggtttatttattcaagtgtctcaggagattattgaacgagcgtggataccacgccgtcgtcagttcatggtggcattgagcagccatagcaccagagtcccggcgcccggtatcagacacgctgacctaccgggcgccttcgagtccgtaccccgcggcctgggtgttagagtccgtaccttgcagcccaggtaggtttcaggtaccagctggttcgtacctgttaaataaatcgcagacgggcgctcacccctacggtcaggagcacaagaacaaccagagagaacagatatacgagcagggttctgaacagcagaccccaattgtcgtctctcatgcttcgctgaaggtaccagttgatggtctgagagctatagtccatcctcacctgaggaacacacgcggcatatttcttggggtctccccacctcgtagacaacgtgatgtccaccatatccacggtgtgcgtcaccgggtgcccaccgatgttccactcgaaataggctccgcgctcatcatggtggtactgctcaccggacacctgcagtctgtccatgtaagattgagagacgatacccacgttcacaaagtgtttctcggtgaagttgcccgacatcctccccttgaagtacagcatgcccatatggaaccagcattggttctcctccactcgaaagtgggccgatctgatctccgataccaccacatccaggggccggggcaccgagtccgcgagtctcaggaacaagacggccaggatcgcgagcaccaacaccggcttcatggctccgaaggtccgctgctcggctccgctcaccgctccggtctggctgcagcagtgcttcgctgagaagcagcgtgtggactgaacggtgtttttgaatatatagcgtttcttggtgacgttgtttcccctacgtagtaggcaactacgtgccaaaagaggcgttacggtactttccgtactgggatttccaaaccgggactttccacacggcggtttcaacaccgggacttttcacacggtgatttcggcaccgggactttccgcacggcggtttcgccaccgctgacgttctcatcgccgcccacgtcaacggtggcgacaccgtactttcccatgcggtttataaacgtcaagagtcacgtcagtcgcccacccccattacacggcgatatcccgatagggcatgaggggacccgggtgtcgcgacatgtcgacgacaggtgcggattagtggtcgtgtcgcgacatggacgtgcagggggatgtctgtcgcgatagagttgatgtgacagcccgctacacctctctgtcgcgacatgcatacacaacgggccggcttgtcggcgattgtcgcgacatatcgttatcagttagcgaccggagttgtctatcgcgacatatcgtcgactatcgcgacagaaaaaataccgttcgtagagaatgccgtgttgaaggaacgcgcttttattgagacgataaaacagcatcaggagccacaacgtcgaatcccacgtccagtcgattcgtatgttatgctgcacagcaatgctagaataacaaccagcagggtaatcccgcaacataaatacaaagtcacagcgaagaatccgtgtcgttctatcaagcgaaacgcgttccaaacggccccgtcacagacgcagttattcataagcgttaacaaccggtggctaggatgaatatccaaatcacagggcagtagccgacggactcgttgacaggtcagcctaccctcaaggttcctatcgttcggacgggatttgtgcgttttaggcctctttttcgccgcctgcaagcattggtgcgcaaagtcctcacccagctgtttccagctatcatctgcatctgtgcagtcccctgtatcgttgtaacaaacgggtctgtgcgacttcgttctcggaacacaagcttgttgtcgcggagacagagagagaagggttttcgggtcacgcgaagaccgctcaccgggggtcggcaacgcacacatcaacagaaaaccgagacgaatcaagagatccatagtgaaggagtgatatcgacgtgcttacgaaacggcgattatatatgttctcaacaataccgccctacgttgtatgatgtaacgtgtgacgtgagtctgatccaacactgaacgctttcgtcgtgtttttcatgcagcttttacagaccatgacaagcctgacgagagcgttcatcggggcatgaagtacgcattacacaaactccatatatttgttacgatagaatacggaacggaggaggctttcgccacacctatcctgaaagcgttgcattctttatgataggtgtgacgatgtctttaccattcccacggctgctttgcgtgatgatgacattcatcatgtatttccattcacacataccttttgtgcatacggtttatatatgaccatccacgcttataacgaacctaacagtttattagcccttgacaggataggtcaaaagattatatgtaggttttccggtaaaccgaattgtgatatttctctgcaggaaatagaacagcctggtacctataaaacggacaatgcagtactgtagcagcgtaaccaagtaggtccacatgaacacgtacaaaattatggtaagccatcgtttttcataccacagcctgtagctgtcgtacatgaatgaggacggtcgaggaacccagggtagttgtaattgggggcgacattcgtactgtccagaagacaattgcacgggtttcagtgagatgagtactttagcgatgtcggcgggggcgctacgtttcaccgtgacggtgagaacttgaccgtcgttttgtatttcatgaggcacgttatacaagccactggtatcatgaaggatgacctctgatgcgatgtgaggattaaattgtccctcaaaccgccaaacgctggtcatgtttccaccgtcaattacgcagctgacggtgtgagataccacgatgttggacttaggtttgggggctaattgcctttttacaaattcccttctgtattgcaggtcctgctgccactgcttttccgtgcggaaagtcgccatgtcttccacacgtgtggcgacgatagacgccaccaaggtagctaccagaagcagctggatccgcatggcattaccgtatgtcaattagaaagttgagcggacacggttatcgttcctggcggatataagtatataaacgcgagttagcctttcccgtccgttttgtacacccgttccccacacaaatgacgaatacgacctttttttttataaaaataaaccacgtgtattatataaaaacatttacatagaaaagagacacactctagattaattaagggccggccgcatcagcttgatatcgaattcctgcagatctgctagataacttcgtataatgtatgctatacgaagttatggatcaacataaggacttttcacacttttggggtacacaggcgtgccaccgcagataataagcgctggatacacggtacacagtcctggccagcacgtatcccaacagcagcaccatcgccatctgtatggcgatcacgaccccgagctctaagtgtctgtattcatagtgtagtcgtcgcaggttatccactgaattcccgtagctgaaataacgtatatggtaccgaggctggcaccacatgggtttgcatttggagcacggcaccaaatgcagagtgagatggtccaagtccgtgggcacccactggcgcaaacggaatacggcttcggtggtctccacgaggcactccggggcttgcagacggccccactttcgtccgtgacggcccgaccagccgacccgagccactatccctttctcgggatagaacgtaccctgtacacgccatacagcgtccaacacgccgtctttgacgacgcagctggcctgatagctggacacgttgttaagcggcggaaagcgaaactgacgtgccggcggagccacatagttcggttcaccgtgttgtcgcggttcgtcctccctatagtaatagtagtcgtcgtcctcataggggttgccggcgtgagccagcgttacccaacagcagcccaggccgacgaggaggcgcagccaccgcctcatggcggcttcgccagtcaatcgtctttagcctcttcttcccgtgaggtccttccggtggcgcggtgccgacctcggacccagggacgtatccacctcaggtacacacagtaggctacctggacaccgaagctgaacaaggctacatgtttcacaaactgcaccagtaccacatagaggaatgtcaggtagcgtctctccgcaaacagccgttccaagtctgagggcgttacccgcagcggcaaccagggcagcctggacgccggccggcaatggagcacgctccggttacaggcactgcaggggtaaacggttaacatcacgtaagagagtcgagcgtccacctgtgggagctcagtttcgtaacgtagagccccgtcattttccagctggggtgcgccgaccttgaaatgggtcgcgctccgttcgttaccccaggtgccgtaggctctcggggccgtatcggagaagttgccgtgcacaagccaggcggccacgagtaccccgtgctggacgtaacattcggacacggaactggagacacggtagccggacacgtccccaaacccgcgagggtactggggcagacggacggacttgctatttgacaacggacagatacgagacgacgaggacgcagacgactcgtcgctggaccacgacaaccggagcgactccttggagcggctcgagagtacacttactgcgatcagacaccagtgccagaagaaggaacaggtggacggggaccacaggatcatagccgccggcaccgcggccggccgcaggaagccgcccggcgcgtcgtctgtgtgcgggagccgaaacaccgtgcctctttatatcgtcccgacgtgacgcgagtattacgtgtcaggggaaaaccccgtcatgacgaacgtgattcgtaagtgacgcggggtgctgacggggttcggctcgagaagtgacggagcgcctcacgtcagtatgatgtccgatccgcgtcagccccgacgtggttatggtcaccgaaacccacgtttatatggacgttgagaacagcgcctgaccacatgattcatcataccatttctcggaatcgggcccatgccgggaaagcacattccttttcagtaaacaacaatgacatcataacaaatcattttattcgcgaggtggataataaccgcatatcaggaggagggatcgggtgatgacgcaggccccgcaaaacagtccgaaataaatttttagtatcgccccgtagtcgcctagataccagaggtacgtcaagttcatcaaaacgcccatcggcgtcccggaatcgtataccgggcacacgaagcgttcataacaatcccgggaggcgagtgttagggtagcagaatagtttcggggtcggtttccttccggcgacgacagctccgtgggcagcagaatgtagagcgcctcggtagccgtcgcggtgccttccacgaggatgggctgccggtgcctttcgtgattttctccgtcgtgtagccaagccgaggcccgcaaagtcttaggcgaggggaattgtccatagactttcaccgcacccttcagtacatggttctgaataacacagccgcacgtgaagtaggtcggttctctcgtctcctccgtggctgccgccaccactcccagccaccacaacaggcaggtcgcgagagggttccggaggcttccccggcgtagcatggtttcgggttaaagcaaaaagtctggtgagtcgtttccgagcgactcgagatgcactccgcttcagtctatatatcaccactggtccgaaaacatccagggaaaatgtcggtgcagccaacctttcacatacagcccccaaaacacttgaatcactgccaccatcatcagcgtatactgcgccgacttaatcgtgagcgcgtagtacgccattagacggcgatcttcgaacaatagtcgttcgatgtcctctaacgagctccacagaggaacccaaggcacgaggcaccggggttcgcactctacataataagtttggcattggtggcagggggaaaagtagaacaacacgagttttgtgcgttggggaacacgatagtcccggagccagtagcgttttgcgacgaggctttcggagacgtcctccaccggcgtcggcactcgatccgcgtagccctccagcgtctggtagtacacccggggtgtcggcgtgggcacggacaggttcccgcgcagggtccacagagcctccagtcgaccgcccgatcggagcacgcagcgcgcctcggaatactctactcggtactccgaaacatcgggcagaggcggtaacggctccgtctccaccaagggcggaggttcatcgaaaagagtcaaggataattcaggcatactacctgcgaccggggcccagagggctaggataagcattacaagattcattctgtcttacaagggaaggctgttcccctgtctagactcaaaagctgtaaggctgtcttatagcatgtagtcttgcacgtcacggggaacagggtggtgatctagtgacgtcgggagaacacggtgttttagggtgcgggggacaaaggacagtacgacagattaggtgatagaaacgtttttttttatttatgaaaaagccagtgtgccgtgcggcctagggccccggcgtagtttggataccagatgggggccgtcaggggtactaccacgagcagaaacataataacttggtccatgtatagcagcatagcggtgcgtagcaggtcgccgtccgtgtagcaatttgacggtgagcgataaagcaccgttaatgtgtcgcggataagcacgatcttgaggccgtagatgaagctcacagtcagtgctaaaatgatgcgttggtatggttcccaggactgcacggcgatgaagagccagagtatgggaagcatgaagcttagcaaacagaggatggctaaccgtcgttgcatgttccaggccatgagccaggctaggcccgtacaccagacgcagagcatggatgacaggacataggcctggattaccacggtgcgatcgaaacacagcccgatggtggacacggatatcgtagtgagggtggtatataccatgaccagcatcagggtcccgggtaggcgccgacgttccagccagtacgcgtggcaacgcagagcgcagggtagcagtgtgctccagaagggcagtgtatcgcgcaggtagggggtcgtcacgcgccacggtatgagcatgaaaaggatggtagtggctatggtggcgctggtctggaacacgacggtgccgtagagacgtaccatccagagaaagtgttgaacgctccgcagggtgtcttcatctttggtgattacggtgactcgacggatcggcggtggtgacggcggcgacacgggtgggggtttctctttcttatggccgagtggctcgccttggtgaaactggatctgtaccatgacgggtgctcgacgaacagtcgtcggggctttaggtacccggcaagttttatagagaaagggggacgatgggtggtggctacgagccaccgccaccttcgcaatacgaggatctgaaggcggcaaagacggtcgtccagggcaggtgccagaggttgggactgagcacgatcagcgtgattttaaacatggtcaccagtcctacgtagatcagcagcgagccacgtaacgtctgagcagccggcagttcgtcgcggatgtaacgcgtgccgtagaaagtcacggtcatcataaggaagacgatggcgccgtagccgtagagtagaatacgctgatgatggaacacggtctggtcgccgataacccagagcgtgatgaaaaaaacgctggtgagcacccgtgtgcatatgagctcccaacgcttagcgcgaaagctgtccccaaccatgacagcgccggtgcaagctatccacagcgtgaggaccagtgtgtagtcgatgaggatggcgggcaggtcggagcaccaggtgtagaaaaccgtggtaacggagaggaggcctacgtagcccatggtcaataccacgtcgtcggggtgcctttcgccctgtatcaagaccaaacaccagagaagggagggggcaaaaaccagcagcagaggggaagattcatgttgacatatgttgtgggaatcggggatgcccagccaaatcattccgcagaaagccgtactgatggcgatgtgaaagaccactagggcgtagacccggacgaggacagcaaaacggcgcagccacataaggccgtggtgcagctgcaggagagaagcccattgcggcgaatgtagcgacggcagcggcgggtccatgaggcgggtgatgcacccgagtgaacgggtgagcgtctcggtggagtcttcttataaaccagcggagctcaggcagtcttgctctggagcgtcgcagtggtggtgttgaggatgacgctgagcgtgccgttgtcaatccggtaatgatgataggtgccaagcttggccaggtagctgaacatttggtcccagcgtgccgaccacaccacgggcgtgagcatcaggagtgtggtgtgataaatgagtgtttcggtggcgtaaagtatcagcgagctgcggatgatgtggctcacgggcattttggtggcgatgtagcgcacgtcttggaaaagaacggccaggatgcagcccacgaacacggtatagagacacagcagagtcttatgcaaccaggtgtaagtagaagccaggacgctgaccatcaccgtcaaaagtgtggaggtaaaaagcgcgtcacgccacacggagctgagacggtgctcccaagccacgccgttgcaggccacgaacaacgtccacgttaagatgaggctggaaacgccaatgggcgctgtggcgcacaggttgagcccggcggtggtgaacgacagaagcgccacatacagcgcaaacaccaggccgttgctggggtgtctatgatcggtaagctccagcgcgcccagaaccaacaccggtgtgcagctaagcaataacggcgaaggatcgtcgcggcactcgtagcccagcgaggggtaacccagccaaaccagcgcgctaatgagcacgctaaaagcggtttccagcgtcagcaatccgtagacacgcatgacgatcgcggtccgccgtagccaacacaccgcatcttcggaagctgtggacgctgtttccgaataccgggaggagatcgtgcttccctcttccaaggatcggaaagtagcgtccgtcgtttccgcagacgcggcttccctggtacgctccgtttccgacgacgcggtttcccgctgcgtggaaactgtctccatgtcgggaccgcagcgcccggcggcgtatccgcaaggtctcgaagctacagcttgtcagaggaaaagtaggtttgcaaaaaggtgcgcagggtcatgattctcagcaccatcagcagagtgaaaaccaggctgagaaacaccttgacggccgccaaaagcgcgcgttccagcggcgtctcgtagcgtacagccagggccgcttcgtggaaatgcgagacggctagacaggtaatgagcacgctgaaggacaagacgatcttaaagcaccaggaccaaccacgcctcaagatgaccaccacgattgccgtgaaggtcaacgtgatcaaagcatggatgaccacgatctgacggcggacggtacgttcgggagccaacaacgctacgccggtgcagctgagaaaggccagtaaggtgaacaacgcggccgagatgaccaacgtaccgtccaggcagagacatatcacgatcaacggcggcacgtgaagcagcgtgtaaaagagcagaacgccgatattgctgggatgcgatgtttcgtaacagtgaatgaagatcaccgacgtgacgggtatgataaagacgaggctgggcgaggactccgtgagacacagacgggaatggtgaaaccacgtcgcgggcgccgcgtagcagaaggcgctcaacaacgcggtcaagccggccagctgccaacccacggcgccataggtgtgcagcgccacgcggcaacagtcgacccaagccagactgcgggtcgccagccgggtctcttggatcccggggggcacgtagatgaccgtgccatcggtgggtacctgaaaccctttttctcttctcatggtgcgctgcgttctctggaaacggctgctctgtccgaaaaccagttccgaacgaaaatctagggcgagagggtggacaacggcgtcgacgacgaagcatgggacaggtcgttcggcgttaacgtcatcgcgtcggacgacggtagttctaagagacgtagatcgctcagcaggtcctgacagttgcggattcgcaagatcagaaaaaaaagggaaatgaacgtaataaagagctgtagcgacgtatgcgctacatcgcgtggcataagaacgtgacggacgaaaaggacctgctgcgaaaagtggccggcaaagataaggcccaccgtgctgtagaagcccaaaagcagccgcaggggccaagtccagggccgcgtaaagacgatgagaacgttaaccagaaagaccacgacccagacgccgttgatgagggtaaattgatcggacagggtgcagttgtcgcgacagatgaagactacttccgcgcagagcaaggtgatgaccaatgtgagcacaaacgacgtcaacacctcgcggggctcctggcaggcacacgtgacacctagcgccgggatgtgcgccaggaggccggcgagtaatagcaccagctgtcggaacggacgacggcagcgcgggtgccggtttcgctgagcgagaaccggtcgctcataacggaaatacacgaagagcgcggaggccacaggcaccaggaggagcacctcgggcgcccagacgacgtgacaaggaaagcctggacgcgacttaagagtcgctgtagggaagaccagagagaagctacccaagacggccaccgccgcggagatttggaagaggagcaagccggcgattcggacgacaacctcgaagcgatgcacccagcccagcacggccaccacggccgcttcatcatagtcgtcgttgttgccgctgtcgaacagccgccgaaacacgatctgtcgctgggtcgcggtgggaaagcgcagacccatgacagccggaggctatatgaccgcgcgtctaaggcgcgagatccgtggggggacttttagatgtttgggcggcccgcggttctaacaggcttgattggtggagacggccggcgcggcgggtgggggaaacgacgagtttttccgttacgccatggttcgcgtgaggtttctctgtacctcccgcaaaaggtcacagcccgaaatggaggccgcgttggtggccccggtggcgcgtgacgataaccaggtcatccaagtgatgagtttgtctaatgagtcctcggtggtgaagaggataagaatgagcaggtacaagtacaccaggttctcatagagacacaaggtgagcaggtcggcctcggaccacgcgatctcaaacaggcgtgtggtgtcaaagaccgtaacgaccagcatgaagctgagcgccatggcgtaatagcccaaaaaaagtttgtgccccaacggtacgggctgcaggtaaagtgcgatcaagaacgcgataacgccgatcacaaacagcgtgacgatgacctgccatcgacggcgattatggccggctagacccgtgacgcagctgcagaggctaaaaagcacgcaagccaagaggcccgagaaggtcaccagcgtagaggaggagcaggcgctggccacgatcaccgaaagcgtcgtgagcacgctataaatggtgagcaggcccgggctcggcggcgacgtaaacgatccttcatcgcgtttgccatgcagcagggccaaacagatggtgggcaccatcaaactcaagggcggcataaagccggtgcaacagagaaagacggtgcctttaagatgcggaaaagccagcaccaggcccagacagagcaagaaggtgcaggtgccctgcacggccacggtgctgtagacccgcatacaaagtaaaaagcgacgtacgtcgttcgtcgagacggaggaaatcataatgactccgcgcgagggtcgcgggggtgggggcgcccaggccgtcccggtggcctctgagttcggagacatgacggcggtggctatcaaaaggcgcgtatgagaaaccgtttatagagtgtaatagaatcaccgtcattcccacacggcgttcccccataaagtcacgtcacactcgagtaagcgtgaaaaagctttattattgaataaaaaacacgagtacaacaccgagttgcggtgtcctgtctactgggtgggggaggtttatcgtctgtctctagagggaaggtggggaacgtctaagcgagcgggagcgtgtcatctcccccatctttttacaacaagctgaggagactcacgccgtcgatgcgtccgccgtgtttctcggcgtactgctgcacccagacgtggccgctaaagatggcgacgctcatgtttaggagactcatgacgatggtgtacaacacgacgctgacacagacgctgtttttagacagcgttccacgctggtagatgagatccagggtctcgtaaataagcacggccgaagcggcggtcaccaccaggacgtagagtccgctgtagatcttgctgacccacagcacgggcgaaaagtaaagcaataggtaaaagacgatgacggaccagccgtagccaatcccgatgactttccagcgcgtgggattgttgccggccaggtaggtgagaccgctgcagagaacgaaaaagaccatcaccagggcaaacgacagaccgatgacgcgcctttctccgcaaaagcccgtgcacacggtgatgccggtgttgatcagcaggcatgccaccgtgagatgagcaaaattggtggtgtgtgggcgaaactcggcgaaaccgcgtagcatggccagcgtggacacgggcacgatggaggacagggctggcactatgccgttggcgcactgtccctgcacatcggggaaggcgagccaagccagcaggcagaccgtgagggtacaagccagctgccacacgagcccgtgatagacctccatgagcagcttgaagcgtttcaaccactggaagagctgctgttcggccaccagcgcgtggctgcgatggagcggcacgatggtgaccgtcggcgactcatggtgttcggaaaccgaggcggtgtcgcccatgctgccgcttacgaccgctgtcggtctaaggtaggcgtcgatgaaacagtccgtcttatcagcacccggttaccgcggatttgattgacgtcacgagtgtggtcaaaccgtggcggcaccctgtatccgacccgtcgtcatgggctccacaaccagagcctcagaagatggtacatgccgatgaataaagccacattttcgacatagaggcgtagcgagggctgaaaactctccgggaaagaactctgacaggtgatcagggacagatcgtgaattagcatcagcgtcaccgtcaacagcgtcgtcgcgtgtaaaccgagaaagaacggggtcgcggcccgcagcagccaaagtcccagcgccgtagcgcagagcagagacaggaccgacggtagccacagccgccggagagacgcgccaggatcgcaacccaaaagcgaggcccccaggcagccgagatctaccgccagggcgagaagagccgcgccgagaaaggcctgcggcgacggctggcacatcagcaaggtcagaaaggctagcgcgtgcggcaggcagtaagccaacaggagtgggagtttgcggggacaacggtcgatagacggaccgcgtagcagcaggaacaggcagccgacgggcacgacgaggctgagatgagaaagcggcggtgggtcgtcgtcccgtccccgctcgcatagctcggccaccggtggcggcatgagccaccagctgagcacgctgagggcgacggtggcggtaagctggaaggcgacgaggacggaggcgcgcagccataccgccagcctctctaagtaggggactacctcctcgacggtccattctagcgggacgacatgaagcatggcgacaagcgcggctgctgtgaaaatgagcgcggttttataggcattaggacttcccgatcgtactggcggctgtcaaagtcccgttgtccaaagacgcgccgtccgaaagactaatccaacggggacccgagagcatgagcaacaacgtgagaaagatggccatgctgtccaggtagagacagacggcatgacggatgcactggttaggtgggcagaaaaagatgaccatgagactgtcgtaggccagaatacccaaaaagaagctgatggagaaggcgcacaacgtcaccactatcttctgcagccagtcggcgtcgcttagcagagcgagcgtgaggaacgaaagcagcatcaccacgtagacgcagctgatgcatttccaacgacgtcggtcacggccacctagaaacgccagccccgtaaaggagataaacaacgccagggtcatcacgtaggaacctactagtacgcggctttcagagcacatttggaagatggccgccgtcaggctgttggccaacagatagatgaaaagcaccgtggcgttactagggtgctcgttgcccaaagtgtacgtgatgaacatgcagacgatgggcacgagcacggtgagaaagaagctgtagttctcgacgcaaaagttgcggttttgtgggaaccccaaccaaaaaacgcttcccaagccgaagctgaaagccaactgaaagatgaagatggcgtacacacgcagccatacggtgaactttttgaaccactcgagagcctccatgcgggagagcagcagcgcgttagcctcctgcgcctgcatggtggcgacggtctcggcacaaagccgctgcggcgcacctacccttctcttatacacaagcgagcgagtggggcacggtgacgtggtcacgccgcggacacgtcgattaggagacgaactggggcgacgccgctgctgtggcagcgaccgtcgtagcgaccgtcgtctgagcagtgtgggcgctgccgggctcggagggcatgaagtagagcacggagacaaagaggtacatgaggtccatgtacaagcagagcgcgcccgggatataactctcatactcgatgtcgtgcaggatgtcctgcgtatcgcacaccaccgaggtcacgatgacggccaaaccggctatcatcaccaggatctcacttaccgcctcgggaaaaagagaaaatacggcgaacagtaagagaatcagcgtggatgcgcccgtcaatagggaacgctgtaattccacgtcgcgggcaaacagatacgtagcgagcgtaaggaaacaaaatagcgttactgtggccaccatggcataaatgactgaacgatgactaaaatggaagcctgacgccgtgacagccacgctggtaagcaacgtgtacgtcagtaagatccatacgtttttgggaaagttgggctcggcccaacgcaacagacctaggcacacgatggagatcattaagcaagacagcgtcagacgcacgctggaaaagagctgctccagccggtgcggcaacaccagccagcaaaaggcgcagacgctcataaggatgaggcattgcacccagataaggatgtagatgcgcagcaggaagaccgaccgggctatctggacctgaccgcggagcgacatggcggcaacgccggcggttatcgccgagattcgtctaaatacacgaagcgaactagaaaacgcacacacgttatttgcaaaaagaaagcagctgccggcttattattttattaaaaatttatctgtgcagaatcataagtttatgatgaataaaaacggggaaagggaatctgcttttagggacccgggtctggtccgtcgtctcccatctggtcgggttcggggatggggacctgtttcagcgtgtgtccgcgggcgtgcatggcttttgctcgccggccgcgctgtaaccaggcctctttctctgtggtcggcgagtcttccgacgggtagggagtctgggagtccatcgcttcaggcccaccgctcgttccctcgaccgtcgtgtcgtcctcgttttcgctattacacggggtttctggagtatcgcctatacggttggcgattctccgggggtggccgctctcgtcctcgtcgctgctatcgccgcccggtaattcgacgccgcattcgttgtacggagcgcggcacatgggcggcggaaagaacttgggcatgcgaaagcagcgttgtccatccacggtctgcgtggtttcatcattatcctcccataatcccccctgtagcgccggcagcgtttcgacgctgtgagaggggaaggcccagttctggttgtcttgcagcgcgcccgtgggcagtaggtccgtgcggccccaggcgctgctgttgttgggtaccttgtcagtgccgcgagtaggtcgcagaaaccagtccagagcgctctctagctgcgagcgtgtgatggtgcccagtgcgccgtgccagcgcagcacgtctcttttcagcgtgtggtgacagacgggcagctcctccaaccgacactcgccgcgcaatccgcggtcgaagcggcagagaccacgcaatttaagcagaccgcacttgagaaacatgtgaaaattatcggcaatgcgatacaggtctgagtcctcgatcttgtgtaggtagaccacgccaaacttgtcgagcagcaccaggccgctgggcacaaaaggcccgtaggccaggtaatagcccacgaggccgacgacgtaccactcgcagcacaagcgttgacgaataaagttcagaagatcgcgaaagtccgcggccggcatgtggtcaaaaggccggcaggcgcgcaggccctcgatggagcccagcatgagcaacggctccacctcggtgcgacccggcgtgcggatgaccaggttgagaccgctcatttcgcgggccgtcttggccacggccgcagcgtcagtggggtcggtgcagaggaatttttgcacatgatagcgcggttcggtggtggcgaacggcgtttgtgggtgccgatacacatattcgcaccagagtaggccgttcttggaaaaggctttgatatcactggccacctcgtagagcccgtcggtctcccagtcgtagacgtagacggtgccgtaatgacttagcatgagcacgcagggcagttcctgcgcctgcttggtgtttcgtgttagatcgctgtcgggtggacgcacggctagtacaccgacggcttccagggtgtcatcgcagcagagatagtcggcggccagagaacgtgcgtaaatctgcgggatggcggcctgttcgcgcatcactaggaaccagttggcggggttgcgcagtgctacggtggttccttggtggcgctgcacgtaggttctcagcgccggaggatcgtactggcgcagatagaggccttgcagcatcgataacgtcttttgaaagacggtgtttctaaattggaaaacgccgtagtcgcagcggatagcatcttcgcagcgctcgtcgcgctgtcggagataggtgccccaggcttcggcggcggctttggtgagtagggacatgccggcggagccgtctcgacagcgagtcggataaagcgcgctgcgcgaaagcttaatataggagcagcgtcagacgaatcgcggctggtggcccggggggtgggacgcgccgcctacacaaaatgctcccgaaaatcgaaactcttgacccactccggagacaaatccgtattcagattgatgcgtcgcgcttccacttcggcttccgaaacctcggcctccgtccggtaggcgttaacaatacgctgacccaggtgccaacgctctttctctgccaaacgccgttgctcaaaccactcgtctacgtccttgaggtcaaagacagtgtcctcctcaaggtcaaagcctaggtcttcccactcgtcgtcatcgctctcgtggccggcggccatacgcgcggcaaccgcgtcttcccctcctcttctttcaacgttgggtaccacgttgttttcttcgggttccatgggttctgcgccactatcgtcatcgtcctctccctgctcctcatcgtccgccaaggcgtcgtggatcacctccaggttctgattgtcgggtacgacgtggttatcttcgtcgtcgtcgcgtggcatgggcggcggccgacggcggacgaccggcatggcgcggccgtcgtttccttcgtcttcctcttcaccgtctcccaaggaacgcggtcgacgacgttccgcgaagtcgccgcggaccacgcgcgcctgccaaatggtaaacgcgtcccaaccgtcccagttattgagcatttcggcgcgaaaacggtcgcctcgacagagccagcgaaactgccgcgcgtagtcgcggtctacgccgctgtcgaacatggtaaagtgcagacgcgccgcctcgcccatgtgtacgcagcctccattgcgttccagcctggccgcgcgccgcagaccgtgttcgtagcggcgacgcacgtacaccttcatgaggccggcgcgaaaaagttcctctaggctgtcggccagacggtagatttcaccggctagacgctgcaggggcggcgagcggtccagatgcgacttgacaatcaccacgtaaaaacgacagaaacggtcgaagatgatgaggaaggacgtgtcaaagaaaccaccggcgcggtaggagcccacggcgcctagcaggtaccagcggcaacgcagttgcagcgtgacgtacatttcgcactcggccaagcgggcggctggcgctacctcgaagggccagcaatccgtcaagcagccgaaactggtcaggagtttcaacgttttggcatggcgcccaggtgtgtgaaagttcacgtcgcgtccgtggtgttcgccaacgcaggcggccaacgcgtcggcgtcatgagcgtgacgcagcagcatcgctaccacgtcgtgcggtacccgcgtagcaaacggcgtctgtggctgacggtatacggcttcggtgtacatcataccgtaacgtgccagctcgtccagatgacgcgcgcacagcagcagaatctcttgcgagggttcgtagatgtagaggcgcgtaccgccccccatgcagagcaccagctccgtctcttcgtagtgatcttccaccatgatcacgcacttgcctagcacgataaggcgttcggggcaacaaatcacgtcgtccagcagttggtcgcgcagctccggcatggtgctgccaggccgcacctgcaggaaccagttgtgcggaatgccgagcgacaacacctggtcgacgtggttacggacccagtcgcgaagcacgtcggcgctgtactggcactcaaagatgccctgaaagtcgctcatgacccgcagaaaagtttcgtagcgcgtgtggcaatagaggaattcatcgtttcgcgtgaacgtgggagctccgtcttcccaacgtgtacgccacatgtcaaaagaggccgccagctagacaccccagaaaagaagcagagaaagagagttctttgtgcgacacgttttattccgcgtcctccgctcgacgctcaaatctggatgtactcgcgcacacccgtcaggctctttaagggaaaagggtccgagtacgtcactaaccgcgactgatgcaccagggcggtaatcacccgctctgcgccctcgcgcgtcgacgaacgcgtcgtcaccaggcagtgcagccgcgggcccgtatcgtcctgatgaccagcggcctcgcgctcggctgcttccacaccgacaatgtcgggatccaacacgtagctctgcgagttggtgtcgtagcggtgtaacaccaacgtgttggggtccagacgctcccacgcgccctcgtgcgggtcaaaacgctccgttaaacagagccagtcatactgctgctgcagaatacgccgctcgcgctcgcgtcgctcatcgggcaacgcagcgtcttcgttgaagagaatgtcccgcttgtggtctacggcacgctcgtggtggtgcgggcacagatgacggtgttccatacgcgtctgacgctgacgctcgcgttcgaagcgccggtgtcgaaagaccattttcagcaaccccatgcggaaaaactccgtgatggtgttggcaacgcgccgcacatagtggttggggtcgtccatctggatggcgtacacggcaccgaaccagtccagcagtaccagcacttcggccacaaagttgcgtcccggtcgcggacgtcccgtcacgcctagcacataccacggcgtggccagattagcacggacagcccaccaccaacgacggctctccacctcggtgagcgcacagaagggccaaatgcggtgtaactgctgcaccgttttcatcagccgcataatcaccgtaccgtaacccggtgtatgcaacttcacgtcgcaacccaggattcgttcggccgtggcgtacgagccctcgggcgtggtgtcattgagaaacaaaacatgcatggtacgcgcgcccttagggtatcgtcgcggaacaggtaccgtcattctccgcagagtggtgtgaatcacgtcgcgatacgcaatctccgaacgcgacacaccgtaacgtgccagttcatccaagttgtgcgatactaacaccatgtacttttcacgagtgtcgtaggcgtagacgcgagaaaagcgacccataaaaaccacgtacggggtagccaccatgccatcatggtgatcgcgacgtggctcgggcaacaaaataacagcgtatcccaacggcgtcagcggctcgcggcaacagatgagctttgacgccgcctgtctggcggcggtaatgatcccgtcctccgtacgtaacatcacatgccagcccttggggggacccaaggacagacaacgtccctcgttacgatgaacgtaacgcgtgatttccattggctccaggcaaaagaacagttccttaaaatcccgcaacacttgtcggtataacgccatgggatcctcggccgccacaggcagcgcggggagctccggcggcacaactgcagcgccgtcagggccagaacccgcagccggatccatcattacgcgacactctcagccggacaaccggcgtcactgacagaagccgagccaaatacagagaaagcaacgctacaccgtcaccccgctcccaagcgccgcggaaagtgctccgatttttcaccgtcgttcgcgacgttgatttgcctcggtctgagaaccgacctagcgttcggaccggtgcgcagaaacagccggcggtccgagccactgagcggttcacagccccggccgccgatagttaccggagagacgttcgagctgcaggtacatcggcgctccccgcttcgccaccccgcgcccgccccagtttatactctccgacgccccgtccaacgcgcctgtggagggccaatcggaccgcgggagctctccaagtggatgacaggcacagccgggtgcccgaccgtgaagagccctcatccacctgaacagaccgctaaccgaaggaccccgagtcgcgtccgtcggtcccgacgtccgtcgccatctggctccctgctgttggctacctctcggatttcaaaaaagagcacgtgccgatgacggtgcacaggaaagagccaaagtgtcacggcgtctttttttatttgtattcctttcctgttttgtactcgtaaactgttgacgttgtttttacatccaaaagggcaagtaagaaacaggatgaggcatggtaggtttgggcgtggggcggccctccagcacggcggcccgggccgcccggcgggtgagcacccggcgttgcgccgtatctatcttgtgtttcttctgtgtctttttcctatcttgttccgcgacggcctctttcatcacgttcagcatgcgttcctcgacgccctccagggatcctggggaggagggagtcctagtgaggcttccaatgttgttttgtggattttcggtttcctcttcttggtcgtcatcgtcggacgtgtcgtcttcctcttgatcctcttcttcgtccgagtagtagacgcatagtccctggttcatcaggctgggattcatcaggttctgacggggaatccgctgttgtagacgtttaaccgcccgttccaggcgagagctcatgccgcaccagacgctgtaacgccgcacgggcccgtagcgggctgtttgttcgcgtacatgatcgttgagctcttgccaatattgtttggcacactccagatcggaggtttgtggatagtcgggtcggatccgcggatcccaactgacatcggcggtgccagagacttcgtccagactgttacgcatagagcaccagtcgggtcggacgataaacctgtccttgcggattaaccatttataacgtagttcgtgatggcgtgtagaggcccgtacacgctccacggtcccaaagcggtcccagaagggaaagttttcgtgggggcagcgacccggcacttccaaacgttcggcgtcgtccacggcgtagtggaaacgccggccggcctggtaaattttgagcagacccacggttaacaacatatccacgctgtcagccaaccgccagatctcgcgccgagatacgtcaaaatagaaaaattcgcaggctcggtcgaccaggatcacgaaatcggcgtgaaaaacgccggagggtagcgactcgcccaccacacccattatcatggtttcacagcataagcggtccacaaagaacttcaacaggtcgttgaattgctccgtctccatacagatgaagggccagacgcctttgaggttctcggcctggccgcagagcagcaacggacgcgtcatctcgcctggagtgcgcagaggcacgcattcgccgcgataacgacaggtcacacgctgcagttcgctgatgctgttgtcgtgcaggcgaaggtcgcagataatatgatccggttgcgtggttagcagcggcgtgcgcatttgctcgccgtagatggcctcgcagtgcaatagcccgtgtcgtgcaaaatcgtccagactgtgcgccaggtagtaaagcaccccgcgatcgcggtctagacaccacacggtttcgtaacgtcctagcagaagcaccagacgggcctggctaggtggctcaatttcctctacatacacgaaaaagtcgtcatcgtccgagtcctcgtcctcagaagaggaccgcggcccgtgtactctgggcaacacggtggtagagaactgcaggacgcccagagactcgagcgactcttcgcagcagatgagctgaccccagggcgtttctggcccgtcggtgacagccgcgctgccaaagatgtcctcaaactctacaaaatctagacgccatccgggtggcgctgaaacgggaaggctaatgttcatatcagcatagctacgaactaagtggcggatgtcctgccgcaagtcttggcagagaatgagctttcgtaaacccttgagggtcctccgaacaacggccccagacgcgtagcgataggactggcgcatggtgccgcggcgtggagcggcacttggcagcctattttatggagtttcttcagtgacgtggcttgttcacgtcgttcgtgggctgcggttggcagctccggtctgtaaaccacccgaaaagactgacatcgacgtcaaagacccacgtaatttggaacatgtgcgaccgcaaagtgcgtcagaataacacgtggctttaggacataaaaagtaccgtgaggtccagacgtggtttttgtgattgacacttacaccaggtaagccaagggacggtgaaactgtatgtgaggaacctgggtgcttagacgactaacgtgtaatgctttttacaggactgttcgacaggtgatagtacctgtaaggtgatgaccacctctacaaataatcaaaccttaacacaggtgagcaacatgacaaaccacaccttaaacagcaccgaaatttatcagttgttcgagtacactcggctcggagtatggttgatgtgcatcgtgggcacgtttctgaacgtgctggtgattaccaccatcctgtactaccgtcgtaagaaaaaatctccgagcgatacttacatctgcaacctggctgtagccgatctgttgattgtcgtcggcctgccgttttttctagaatatgccaagcatcaccccaaactcagccgagaggtggtttgttcgggactcaatgcttgtttctacatctgtctttttgccggcgtttgttttctcatcaacctgtcgatggatcgctactgcgtcatcgtctggggtgtagaattgaaccgcgtccgaaataacaagcgggctacctgttgggtggtgattttttggatactagccgtgcttatggggatgccacattacctgatgtacagccataccaacaacgagtgtgttggtgaattcgctaacgagacttcgggttggttccccgtgtttttgaataccaaagttaacatttgcggctacctggcgcccattgcgctgatggcgtacacgtacaaccgtatggtgcggtttatcattaactacgttggtaaatggcacatgcagacgctccacgttcttttggttgtggttgtgtcttttgccagtttttggtttcctttcaacctggcgctatttttagaatccatccgtcttctggcgggagtgtacaatgacacacttcaaaacgttattatcttctgtctatacgtcggtcagtttttggcctacgttcgcgcttgtctgaatcctgggatctacatcctagtaggcactcaaatgaggaaggacatgtggacaaccctaagggtattcgcctgttgctgcgtgaagcaggagataccttaccaggacattgatattgagctacaaaaggacatacaaagaagggccaaaaacaccaaacgtacccattatgacagaaaacatgcacctatggagtccggggaggaggaatttctgttgtaattcgatcctctctcacgcgtccgccgcacatctatttttgctaattgcacgtttcttcgtggtcacgtcggctcgaagaggttggtgtgaaaacgtcatctcgccgacgtggtgaaccgctcatatagaccaaaccggacgctgcctcagtctctcggtgcgtggaccagacggcgtccatgcaccgagggcagaactggtgctaccatgacgccgacgacgacgaccgcggaactcacgacggagtttgactacgatgaagccgcgactccttgtgttttcaccgacgtgcttaatcagtcaaagccggtcacgttgtttctgtacggcgttgtctttatcttcggttccatcggcaactttttggtgatcttcaccatcacctggcgacgtcggattcaatgctccggcgatgtttactttatcaacctcgcggccgccgatttgcttttcgtttgtacactacctctgtggatgcaatacctcctagatcacaactccctagccagcgtgccgtgtacgttactcactgcctgtttctacgtggctatgtttgccagtttgtgttttattacggagattgcactcgatcgctactacgctattgtttacatgagatatcggcctgtaaaacaggcctgccttttcagtattttttggtggatctttgccgtgatcatcgccattccacactttatggtggtgaccaaaaaaaacaatcaatgtatgaccgactacgactacttagaggtcagttacccgatcatcctcaacgtagaactcatgctcggtgctttcgtgatcccgctcagtgtcatcagctactgctactaccgcatttccagaatcgttgcggtgtctcagtcacgccacaaaggtcgcattgtacgggtacttatagcggtcgtgcttgtctttatcatcttttggctgccgtaccacctgacgctgtttgtggacacgttgaaactgctcaaatggatctccagcagctgcgagttcgaaaaatcactcaagcgcgcgctcatcttgaccgagtcactcgccttttgtcactgttgtctcaatccgctgctgtacgtcttcgtgggcaccaagtttcggcaagaactgcactgtctgctggccgagtttcgccagcgactcttttcccgcgatgtatcctggtaccacagcatgagcttttcgcgtcggagctcgccgagccgaagagagacgtcttccgacacgctgtccgacgaggtgtgtcgcgtctcacaaattataccgtaataaaaaagcgctacctcggccttttcatacaaaccccgtgtccgccccttttttccccgtgcccgatatacacgatattaaacccacgaccatttccgttcgattagcgaaccggaaaagtttatggggaaaaagacgtaggaaaggatcatgtagaaaaaacatgcggtgtttccgatggtggctctacagtgggtggtggtggctcacgtttggatgtgctcggaccgtgacggtgggtttcgtcgcgcccacggtccgggcacaatcaaccgtggtccgctctgagccggctccgccgtcggaaacccgacgagacaacaatgacacgtcttacttcagcggcacctctttccattcttccgtgtcccctgccacctcagtggaccgtcaatttcgacggaccacgtacgaccgttgggacggtcgacgttggctgcgcacccgctacgggaacgccagcgcctgcgtgacgggcacccaatggagcaccaacttttttttctctcagtgtgagcactaccctagtttcgtgaaactcaacggggtgcagcgctggacacctgttcggagacctatgggcgaggttgcctactacgggggttgttgtatggtgggcgggggtaatcgtgcgtatgtgatactcgtgagcggttacgggaccgccagctacggcaacgctttacgcgtggattttgggcgcggcaactgcacggcgccgaaacgcacctaccctcggcgcctggaactgcacgatggccgcacagaccctagccgttgcgatccctaccaagtgtatttctacggtctgcagtgtcctgagcaactggttatcaccgcccacggcggcgtgggtatgcgccgctgtcctaccggctctcgtcccaccccgtcccggccccaccggcatgacttggagaacgagctacatggtctgtgtgtggatcttctggtgtgcgtccttttattagctctgctgctgttggagctcgttcccatggaagccgtgcgtcacccgctgcttttctggcgacgcgtggcgttatcgtcgtccacttccaaggtggaccgcgccgtcaagctgtgtcttcggcgcatgctgggtctgccgccgccaccgtcagtcgcaccacctggggaaaagaaggagctaccggctcaggcggccttgtcgccgccactgaccacctggtcactaccgccgtttccgtccacgcggatacctgacagtccgccgccaccgtaccagcttcgtcacgccacgtcactagtgacggtacccacgttgctgttatatacgtcatccgacatcggtgacacagcttcagaaacaacgtgtgtggcgcacgctacttatggggaacccccggagcccgctcgatcgacggctacggttcaggaatgtaccgttcttaccgctccaaattgcggcatcgtcaacaacgacggcgcggtctctgaaggccaagaccatggagatgcggttcaccatagcctggatgtggtttcccagtgtgctgctgatactggggttgttgacgcctccgagtaacggctgcactgttgatgtcggacgaaacatgtccattcgagaacagtgccgccttcgaaacggtgcgacgttctccaagggagacatcgaaggtaacttcagtgggcccgtcgtcgtggagttggactacgaagacatcgatattactggcgaacggcagcgacttcggttccacctcagcggactcgggtgtcctacaagggagaaaataagaaaagataatgaaagcgacgtcaacggtggaattcgctgggctctatatatacaaaccggcgacgccaagtacggtattcgtaatcagcatttgagtatacggttaatgtatcctggggaaaaaaatacacaacagctgttgggttctgatttcagttgcgaacgtcaccggagaccgtccacgccgttgggaaagaacgccgaagtgcctcccgcgacccgcacgtcttctacatacagcgtcctcagcgcttttgtagtgtggatcggatccggcctcaatatcatctggtggaccggcatcgtgcttctggcggtggacgctctcggacttggcgagcgttggctgaggttagcactgtcccaccgggacaaacatcacgcatcgcgaaccgcggcgctccagtgtcaacgcgacatgttacttcggcaacgtcgacgggctcggcggctgcatgccgtttctgaaggcaaactgcaggaagagaagaaacgacagtctgctctggtctggaacgttgaggcgcgaccctttccgtccacacatcagctgattgtgctgccccctcctgtagcgtcagctcctcctgcagttccctcgcagccccccgagtattcgtctgtgtttccgcctgtataaaaataaagagacgggaggctgatcgcggccttcagcgtctcatttgtctttactctcgagtgcggtcggtgtctcgtcggtgagacgaggccgccgcccgacaagttcgatctcatgtcgctcttggagcgcgaagagagttggcgtcgcgtagtcgactactcgcacaacctgtggtgtacgtgcggtaactggcagagccacgttgagattcaggacgaagagcccaactgcgagcagccggagcccgcacactggctggaatacgtggcggtccagtggcaggcccgggttcgcgattctcacgatcgctggtgtctctgcaacgcctggcgtgatcacgctttgcgcggccgttggggtacggcgtattcctcgggttcctcggcctcttcctccggtttcgtcgcggagagcaagttcacctggtggaaacgactgcgccacagtacccggcgctggttgtttcgccgccggcgagctcgatacactccatctaactgtggggaaagtagcactagcagcggccagagtagcggtgacgagagtaactgcagtctacgcacccacggcgtgtacacacggggtgaacaacactaatcgataagtcgcgtgtaggcgactggctacatcaaccggatatctgcggggatttaaaaagacgacccgttgtcatccggcttagagcaaaccgtccttttatcatcttccgtcgccatggctatgtacacatccgaatccgaacgcgactggcgtcgtgtaatccacgactcgcacggcctgtggtgcgactgcggcgactggcgagagcacctctattgtgtgtacgacagccattttcagcgacgacccacgacccgagccgaacggagggccgccaattggcggcgacagatgcggcggttacaccgtctgtggtgtttttgtcaggactggaagtgtcacgcgttatacgccgagtgggacggcaaagaatccgacgacgagtcgtcggcgtcttcctcgggcgaagcgccagagcaacaggtccccgcttggaagaccgtgcgggccttctcgcgggcctaccaccaccgcattaaccggggtctgcggggcacgcccccaccgcgcaacttgccgggatacgagcacgcctccgagggctggcggttttgcagtcgacgggaacggcgagaggacgatcttcgcacgcgggctgagccggaccgcgtggtgttccagttagggggagtacctcctcgtcgtcaccgagaaacttacgtgtaagaacacggcgtgacaataaacaacatagcgtaaatccccgtgtgatgtgtgtgattgacgttcgggaaacatgtccccatcatcagcgtcacaactgacgtgggttggtcactgacgtgcaggatgttgcgcgagtcagagaatcgcataagaacggggtggtgagcgggttcccacaggagtctctggcgcaaaagcaccatgagcctcaggttccccgagagggcgggttacgagaaactgggataccgcccgcatgccaaacgcgtgcgggtgcatgacccgttgggattgacgcggtttatcatgaggcaactcatgatgtacccgctggtgttgccgttcacctttccgttttacgtgccgcggtcctagcacgtcagtggtgatgctgataattgcaacatggcccatgacgaacccgcttgggacgaacgtcaataccacgtcaaaccaccgtgacttggctgaacgttgaaacataaagccaaagcgccgtcggcacttggcttcagagcagcgcctcggggcgatgcgacggcgatgaacttagagcaactcatcaacgtccttggtctgctcgtctggattgccgctcgtgctgtcagccgcgttggtccgcatggctccggactcgtttatcgtgagcttcatgatttctacgggtatctgcagctggaccttctgggaccagtggtggcggggaatcgctcagtccggacctggaaagagcaggcggaccgagccagagggaccttcgttcggcgttcaggccttaatactagctacatcttacctgtcggcggcctgtctgggggctccggtaccttacccgtcggcctgtatcgtcccgaagaagaggtgttcctcctcttgaaccgctgccatgggccactgtcaacgccgaaaaatgcttgtctggctgaggtcggtgtcgctaatgccacttttttgtctcgcttcaatgtcggtgattttcacggagcgtcatgggaaaacggtaccgctcccgatggagagcccggggtatgctgaaattcctcttaagattccgtaaacgacgttgtccagtcgttgtgccgcgattcgtacggttcatcgtctacgtcgttttgttcaccgtcgctgtgcaacgcgtgaaacaagagcgtgatgcgcaccttcggcggtatgaagaacggttacggaaaaaccgcgcacggcgtcggcagtcttttccgtgacttggggcgatgggtccgagctgcggtatgggtcacggcggcgtgtgttttattgacgaagatgccgatgtgtgactaaaaacgtcccagccctagagcgatgtgtttcaataaaaattatgtcgtatcatagtatgcgtgtcctggtttttcatttttggatgtatttgtgacataaaaggcgatagaatgtggggacgaaacatatccagatacacagttttgttattcgaacaaaacccgtgtgatgcagaaaacagtactgcaggatgaaagtcccatgggggggggggggcagacagtagtcgtttttgccgctgggcgtacgctatgcttgtatttatgactataatatgtgcactcgtgtgtcgatgttcctattgggaagggtgtcaatgtaggaggtataaagaatggtgggatgcggagaggcatcgctagacacaggttgatcgctgtgctagccccacctgatcagcgtcatgggtaaagcggtgattaagcgtgaaaacaccgtaagggggggggggcagacaggaagcttggtggcagtggccgttagatgcattacgtgtctgtattggtacatttgcaaaccgtcgggtgtggcggtatagtttagcgatgattatattatgtatgtgccgtatagaatggcctaaaacattgtaacacgaaacgttacaatgatgggaaagatgccgataaaaaacacataaaaggcatatacacgaattactagttacacgtttgtctatgtgcgagtttaaggacgcttgtataatgcgtatgacggcaaacggccgcggaaacgatggggggggggggtagtaactgtattaattatacgtcttgcagtacacggtattgtgtgctggtgcgcgtattacgacacgaacggcatagcgctataaccgggtgtatggtatttatatgtgcgtctagcatccttgcgagattctgaaagtcttcttgtaagcgtaattaaaacggtgtatgttctgcgtaaagtgcattcaaacaacgtaacagtatgggatgaatgccaataaataacatataaaagcgagaagtatacatataagggttgctagacacaggtttgtttctgtgctagcccaatggcacttgtacaatccatgcaagcaaaaaaaggatgcgaaaccaacatcgtggggtggggggggggtaaaagcaatgttaatcattggtctcgcggtgcaagttgctgcgttttacgtgtattgttacacgggttgcgtatcggtataatcggatgtgtgttactcattcgtggcgttgttatagtattgtgaaaaagaattctcgtaagcatgttgacaactgcaaaataaaaccattttattgagcattgtaatggtagtgtgtcgctacattagaaaacgtgacgcgtcgcatgtcgcggcacaatctggcagcggggtcggggtagggtacggtgggaggcatgtacacagatggaacaaaagcagaagtaacgtgagacggagcatatagtccagtatccagcggttcctgagtagcaccacccatcaactgaatgccctcatgagtaaaagtctgcgggcggcagcccttggggaccgttggcatgggacgatcgatctccaaaccacagcgtaacacggttttcttccaacgtcgttgatacacgtcgtttttacggttactccccagaacccagaaagtctcgtccaagtcgtaccaggagtcttccccagggagacgtggcggtttccaatcctcatcgtcccgtcgcaaagcacgtcccaaactggcttggggagtcaacggtggttctgtgggtcgggtgtagcgcgagtgttttccgttcatgagcgattcgtcctccttgcctttaggctttttggcctttttgtgtatcatctggccgccggcctccataaccaccgtggccaagtccagtcccagagcttgagcgtcggcgcggcgtcgggcgtcttgcaggtagtcttccacatttgcacagatggccgggtgtttggtggctagggtgaggacctcagcctcgccgcggcccggacgtagcaaaaaagctaactgcccgtgcggctcgcgcgcccacagcgcggcgcgcgggtgcaggtgcagcgcgtcccagcgcggccgctcccactgctcgcggtccagctcgggcagcagccgccgcgcggcctcggcggcgggcgccgactcgcgccccagcgccagcgcgcccaacacgcccgcgcgcagaaagtgcgacagctccgccgccagcgggtacacgtgcccgtccagcgggcagtacccgaacacggcgcccagctcgtccagcaccaccaccagcatggcgcgcggcacggtccccgacgccgccggacccgccatcgccgtcggacccaccatcaccgtcggcgccgccgctgctgccgctgccgcatccgttccgaccaccgcgtgcgcgtccgcgtttggcacgcaaatcgcgctcccgccggcggcgccgtacggctgcggaggtaaagtcacagcagaccccacggctcccgccatcgcgcacggcgcgtccccgccggcggcctccgtctccgtgccgctcgcccccggcagcaacgtcgtccccgtcgccatcgccgtcgtccccgccgtcatcgtcgtcgtcgtccccgccgtcgtccctgtcgccggccctgccgcgcagcgcagccaccgcgacggcagcaccgcgcccagcgccagccagccgcagcacagacgctggttcaggtgccgacgcacggccgtcagcagcgacgcggggtgcggcgccgacgcgaacggctcgtactgcgccagctcctgccacgcgcccagcagcaccatcggctgcagtcgcctgcccggcgtctgcagcgccaccgtcgtgccggcccaccgccggcgcagctcccgtccgagcgccgtcgcctcctcggcgcgcagcaacgtctggcgaagcgccggctgaggcagcagcgtcgcgcgcggggtgcccacgcccagccggttgcagcggtacaggcgcaccacctcgcccgcgccgtgccgaaaccactcgtccgcgtcgcgcgccgccaggatcagcgtgttgttcgccaggtcgtacacgaacacgcggaacccggcgcccagcgccaggtacagtccgtcctgcgcgcacagaccctcgggatggccggccttgtcgcccaccgtcgggtcggccgcggggtccacctcgtgcaccacggtcgccaccagcacgatccacgcgtcccgcggcgacagctgacgcaggtccgtggcgcccacgccgttcatctggctgcgcggcgtcactcgcgcgtagaatccgtacggccgtccgagcggcagcagcgtgcccgcgtcgcgctgcgaccacttgcgcatggcgcggcccgtgctgttggccaaaaacgcggcgcgccacacggcgcccatggcctggtattccagctccgtcagcgcctggcgctccaccggaatctgagacagcagcaagcgctccgggccgtgccaaaaggtgctgttgttgccgctacccggaggggcgcccggcggcccgcggggttctacccggtggacggcgtgggccggcgtcgccgtacccgcagtactcgtactagtccccgctgttgacgtcgcttccaaagaagaagaacgagaggaaccaacccccgaaggccctccggctccgcggccgcgaccgaggggcggggggcgcggcgacatgccgttgcgctgggccatggccgccggacgcctccgacgtccactctgtatatataggaagcaaacccgcgtcagcgaccacgccgtttacacacgcggacgcctccgtcgcccgtgtgccgcgggcgacacgcacctggcttttataggcagcgacgtgcacggcgcttgctggcgccgccttgccgccgcgcagtctggaaggccgtgaaaaaaccgaaagaagatgcgcgacaagccaccaacaacgggccgccgagcgcgcgcacacctaggtggacgcctgacctccattccgggccgtgtgctgggtccccgaggggcgggggggtgttttcatcgggggggtgaaatgtgggaatttgggaagttggcggtggcgggggacggcgacggcgaataaaagcgccgtgcggcgcgcacggcgaaacccagacgcgcgtgtgtcttgcgtctctttcagtcgcgcgtctgtcttgcgtgtctttgagtccccggggaaaagaggaagcggtcccgaggggacggcggcgcgactccctggggacgcgaagatcggacgcggaaaagaggaagtccccggggacggccacaggcggaaaaaaaaaacgaggaagccgcagcccagtctgccgggaccggcaggcaggcgcacagacccgcgtcgaggacacacgcagaagaagcgcccgcgccggggcggggggggggatcgcgggccccggggcacactgcttccatctggccgcgcgcacaccccgccgacacacccctgacacacccgcgacacacccggcacacgcccgcgacacacccggcacgcgcccgccacacagccagccgacacacccgcgacacacccgccacacccagccgcacccggcacacacccacccagccgcacccccgccacacccagaccgacgccggtgcgggwccggg

1. A fusion protein comprising or consisting of
Ag85A-ESAT-6-Rv3407-Rv2626c-Ra12-TbH9-Ra35-RpfD.

2. A fusion protein encoded by a nucleic acid comprising a sequence having 90%, 91%, 92%, 93%, 94%, 95%, 96%, 97%, 98%, 99%, or 10000 identity to the nucleic acid sequence according to SEQ TD NO:41.

3. (canceled)

4. The fusion protein of claim 1, further comprising a poly-His tag, wherein optionally,
(i) the poly-His tag comprises or consists of two to six His residues;
(ii) the poly-His tag is located at the N-terminus of the fusion protein; and/or
(iii) the poly-His tag is inserted after the initial Met residue.

5.-7. (canceled)

8. The fusion protein of claim 1, further comprising a HA tag, wherein optionally, the HA tag is located at the C-terminus of the fusion protein.

9. (canceled)

10. The fusion protein of claim 1, wherein the fusion protein further comprises one or more linkers connecting one or more of Ag85A, ESAT-6, Rv3407, Rv2626c, RpfA, RpfD, Ra12, TbH9, and Ra35, wherein each of the one or more linkers comprises or consists of one or more amino acid residues.

11. A nucleic acid molecule encoding the fusion protein according to claim 1.

12. A vector comprising the nucleic acid molecule of claim 11.

13. The vector of claim 12, further comprising a promoter, wherein a promoter is operably linked to the nucleic acid molecule encoding the fusion protein.

14. (canceled)

15. The vector of claim 12, wherein the vector is a cytomegalovirus (CMV) vector.

16.-19. (canceled)

20. The vector of claim 15, wherein the viral vector is a RhCMV vector, a HCMV vector, or a recombinant HCMV vector.

21. The vector of claim 15, wherein the promoter is operably linked to the nucleic acid molecule encoding the fusion protein and the promoter is a UL78 promoter, or an ortholog thereof, wherein optionally, the nucleic acid molecule encoding the fusion protein replaces all or part of UL78.

22.-26. (canceled)

27. A recombinant HCMV vector comprising a TR3 backbone and a nucleic acid sequence encoding a heterologous antigen according to SEQ ID NO: 42, wherein:
(a) the vector does not express UL128 or UL130, or orthologs thereof,
(b) the vector comprises a nucleic acid sequence encoding UL146, UL147, UL18, and UL82 or orthologs thereof, and
(c) the heterologous antigen replaces all or part of UL78 and is operably linked to the UL78 promoter.

28. The recombinant HCMV vector of claim 27, wherein the recombinant HCMV vector comprises a nucleic acid sequence having at least 90%, 91%, 92%, 93%, 94%, 95%, 96%, 97%, 98%, 99%, or 100% identity to the nucleic acid sequence according to SEQ ID NO:44.

29. The vector of claim 15, wherein the RhCMV or HCMV vector (i) comprises a nucleic acid sequence encoding UL146 and a nucleic acid sequence encoding UL147, or orthologs thereof, and (ii) does not express UL128 or UL130, or orthologs thereof.

30. The vector of claim 27, wherein the vector does not express a UL128 protein or a UL130 protein, resulting from the presence of one or more mutations in the nucleic acid sequences encoding UL128 and UL130.

31. The vector of claim 30, wherein the mutation in the nucleic acid sequences encoding UL128 and UL130 is a point mutation, frameshift mutation, truncation mutation, or deletion of all of the nucleic acid sequences encoding the viral protein.

32. The vector of claim 15, wherein the vector is a HCMV vector comprising a TR3 backbone.

33. The vector of claim 15, wherein the vector further comprises a nucleic acid sequence encoding a microRNA (miRNA) recognition element (MRE), wherein the MRE contains a target site for a miRNA expressed in endothelial cells and/or a miRNA expressed in myeloid cells.

34. (canceled)

35. A pharmaceutical or immunogenic composition comprising the vector of claim 12 and a pharmaceutically acceptable carrier.

36. (canceled)

37. A method of generating an immune response in a subject, comprising administering to the subject the vector of claim 12.

38.-39. (canceled)

40. A method of treating or preventing tuberculosis in a subject, comprising administering to the subject the vector of claim 12.

41.-42. (canceled)

43. The method of claim 40, wherein the subject is CMV positive.

44.-50. (canceled)

51. The method of claim 40, wherein the tuberculosis is a latent, pulmonary, and/or recurrent tuberculosis infection.

52.-59. (canceled)

60. A method of generating CD4+ T cells that recognize MHC-II/peptide complexes, the method comprising:
(a) administering to a first subject the CMV vector of claim 15 in an amount effective to generate a set of CD4+ T cells that recognize MHC-II/peptide complexes;
(b) identifying a first CD4+ TCR from the set of CD4+ T cells, wherein the first CD4+ TCR recognizes a MHC-II/fusion protein-derived peptide complex;
(c) isolating one or more CD4+ T cells from a second subject; and
(d) transfecting the one or more CD4+ T cells isolated from the second subject with an expression vector, wherein the expression vector comprises a nucleic acid sequence encoding a second CD4+ TCR and a promoter operably linked to the nucleic acid sequence encoding the second CD4+ TCR, wherein the second CD4+ TCR comprises CDR3α and CDR3β of the first CD4+ TCR, thereby generating one or more CD4+ T cells that recognize MHC-II/peptide complexes.

61. (canceled)

62. A method of generating CD8+ T cells that recognize MHC-Ia/peptide complexes, the method comprising:
(a) administering to a first subject the CMV vector of claim 15 in an amount effective to generate a set of CD8+ T cells that recognize MHC-Ia/peptide complexes;
(b) identifying a first CD8+ TCR from the set of CD8+ T cells, wherein the first CD8+ TCR recognizes a MHC-Ia/fusion protein-derived peptide complex;
(c) isolating one or more CD8+ T cells from a second subject; and
(d) transfecting the one or more CD8+ T cells isolated from the second subject with an expression vector, wherein the expression vector comprises a nucleic acid sequence encoding a second CD8+ TCR and a promoter operably linked to the nucleic acid sequence encoding the second CD8+ TCR, wherein the second CD8+ TCR comprises CDR3α and CDR3β of the first CD8+ TCR, thereby generating one or more CD8+ T cells that recognize MHC-Ia/peptide complexes.

63.-67. (canceled)

68. A CD4+ T cell generated by the method of claim 60.

69. A method of treating or preventing a disease in a subject, the method comprising administering the CD4+ T cell of claim 68 to the subject.

70.-71. (canceled)

72. A CD8+ T cell generated by the method of claim 62.

73. A method of treating or preventing a disease in a subject, the method comprising administering the CD8+ T cell of claim 72 to the subject.

74.-75. (canceled)
